(19) United States
(12) Patent Application Publication
(10) Pub. No.: US 2024/0254493 A1
(43) Pub. Date: Aug. 1, 2024

(54) COMPOSITIONS AND METHODS FOR SILENCING CARBONIC ANHYDRASE 2 EXPRESSION

(71) Applicant: ALNYLAM PHARMACEUTICALS, INC., CAMBRIDGE, MA (US)

(72) Inventors: JEFFREY ZUBER, SOMERVILLE, MA (US); JAMES D. MCININCH, BURLINGTON, MA (US); MARK K. SCHLEGEL, LEXINGTON, MA (US); ADAM CASTORENO, FRAMINGHAM, MA (US)

(73) Assignee: ALNYLAM PHARMACEUTICALS, INC., CAMBRIDGE, MA (US)

(21) Appl. No.: 18/562,787

(22) PCT Filed: May 27, 2022
(86) PCT No.: PCT/US2022/031337

§ 371 Date: Nov. 20, 2023

Related U.S. Application Data
(60) Provisional application No. 63/289,319, filed on Dec. 14, 2021.
(60) Provisional application No. 63/194,073, filed on May 27, 2021.

(51) Int. Cl. C12N 15/113

(52) U.S. Cl. CPC C12N 15/1137; C12Y 402/01001; C12N 2310/14; C12N 2310/3125; C12N 2310/315; C12N 2310/3515

(57) ABSTRACT

Carbonic anhydrase inhibitors have been shown to reduce aqueous humor production and thereby reduce intraocular pressure in the eye. Accordingly, there is a need for agents that can selectively and efficiently inhibit expression of the CA2 gene such that subjects having a CA2-associated disorder, such as glaucoma, can be effectively treated. The disclosure relates to double-stranded ribonucleic acid (dsRNA) compositions targeting carbonic anhydrase 2 (CA2), and methods of using such dsRNA compositions to alter (e.g., inhibit) expression of carbonic anhydrase 2.

### CROSS-REFERENCE TO RELATED APPLICATIONS

[0001] This application claims the benefit of priority to U.S. Provisional Application No. 63/194,073, filed on May 27, 2021, and claims the benefit of priority to U.S. Provisional Application No. 63/289,319, filed on Dec. 14, 2021. The entire contents of the foregoing applications are hereby incorporated herein by reference.

### FIELD OF THE DISCLOSURE

[0002] The disclosure relates to the specific inhibition of the expression of carbonic anhydrase 2.

### BACKGROUND OF THE INVENTION

[0003] Glaucoma is a leading cause of vision loss. Risk factors for glaucoma include increased intraocular pressure, age, race and vascular disease. The increased intraocular pressure may cause damage to the optic nerve and loss of never fibers. Lowering intraocular pressure can reduce development and progression of vision loss.

[0004] Carbonic anhydrase 2 (CA2) is a member of the carbonic anhydrase (CA) family of metalloenzymes. CA2 catalyzes the reversible conversion of carbon dioxide to bicarbonate. Carbonic anhydrases are expressed in the eye and CA2 appears to be the main CA form present in human ciliary epithelium which is responsible for producing aqueous humor. Carbonic anhydrase inhibitors have been shown to reduce aqueous humor production and thereby reduce intraocular pressure in the eye.

[0005] Accordingly, there is a need for agents that can selectively and efficiently inhibit expression of the CA2 gene such that subjects having a CA2-associated disorder, such as glaucoma, can be effectively treated.

### BRIEF SUMMARY OF THE INVENTION

[0006] The present disclosure describes methods and iRNA compositions for modulating the expression of carbonic anhydrase 2 (CA2). In certain embodiments, expression of CA2 is reduced or inhibited using a CA2-specific iRNA. Such inhibition can be useful in treating disorders related to CA2 expression, such as ocular disorders (e.g., glaucoma or conditions associated with glaucoma).

[0007] Accordingly, described herein are compositions and methods that effect the RNA-induced silencing complex (RISC)-mediated cleavage of RNA transcripts of CA2, such as in a cell or in a subject (e.g., in a mammal, such as a human subject). Also described are compositions and methods for treating a disorder related to expression of CA2, such as glaucoma or conditions associated with glaucoma.

[0008] The iRNAs (e.g., dsRNAs) included in the compositions featured herein include an RNA strand (the antisense strand) having a region, e.g., a region that is 30 nucleotides or less, generally 19-24 nucleotides in length, that is substantially complementary to at least part of an mRNA transcript of CA2 (e.g., a human CA2) (also referred to herein as a “CA2-specific iRNA”). In some embodiments, the CA2 mRNA transcript is a human CA2 mRNA transcript, e.g., SEQ ID NO: 1 herein.

[0009] In some embodiments, the iRNA (e.g., dsRNA) described herein comprises an antisense strand having a region that is substantially complementary to a region of a human CA2 mRNA. In some embodiments, the human CA2 mRNA has the sequence NM_000067.3 (SEQ ID NO: 1). The sequence of NM_000067.3 is also herein incorporated by reference in its entirety. The reverse complement of SEQ ID NO: 1 is provided as SEQ ID NO: 2 herein.

[0010] In some aspects, the present disclosure provides a double stranded ribonucleic acid (dsRNA) agent for inhibiting expression of carbonic anhydrase 2 (CA2), wherein the dsRNA agent comprises a sense strand and an antisense strand forming a double stranded region, wherein the sense strand comprises a nucleotide sequence comprising at least 15 contiguous nucleotides, with 0, 1, 2, or 3 mismatches, of a portion of a coding strand of human CA2 and the antisense strand comprises a nucleotide sequence comprising at least 15 contiguous nucleotides, with 0, 1, 2, or 3 mismatches, of the corresponding portion of a non-coding strand of human CA2 such that the sense strand is complementary to the at least 15 contiguous nucleotides in the antisense strand.

[0011] In some aspects, the present disclosure provides a double stranded ribonucleic acid (dsRNA) agent for inhibiting expression of CA2, wherein the dsRNA agent comprises a sense strand and an antisense strand forming a double stranded region, wherein the antisense strand comprises a nucleotide sequence comprising at least 15 contiguous nucleotides, with 0, 1, 2, or 3 mismatches, of a portion of nucleotide sequence of SEQ ID NO: 2 such that the sense strand is complementary to the at least 15 contiguous nucleotides in the antisense strand.

[0012] In some aspects, the present disclosure provides a human cell or tissue comprising a reduced level of CA2 mRNA or a level of CA2 protein as compared to an otherwise similar untreated cell or tissue, wherein optionally the cell or tissue is not genetically engineered (e.g., wherein the cell or tissue comprises one or more naturally arising mutations, e.g., CA2), wherein optionally the level is reduced by at least 10%, 15%, 20%, 25%, 30%, 35%, 40%, 45%, 50%, 55%, 60%, 65%, 70%, 75%, 80%, 85%, 90%, or 95%. In some embodiments, the human cell or tissue is a ciliary epithelium cell, an optic nerve cell, a trabecular meshwork cell, a Schlemm's canal cell (e.g., including an endothelial cell), a juxtacanalicular tissue cell, a ciliary muscle cell, a retinal cell, an astrocyte, a pericyte, a Müller cell, a ganglion cell (e.g., including a retinal ganglion cell), an endothelial cell, a photoreceptor cell, a retinal blood vessel (e.g., including endothelial cells and vascular smooth muscle cells), episcleral veins or choroid tissue, e.g., a choroid vessel.

[0013] The present disclosure also provides, in some aspects, a cell containing the dsRNA agent described herein.

[0014] In another aspect, provided herein is a human ocular cell, e.g., (a ciliary epithelium cell, an optic nerve cell, a trabecular meshwork cell, a Schlemm's canal cell (e.g., including an endothelial cell), a juxtacanalicular tissue cell, a ciliary muscle cell, a retinal cell, an astrocyte, a pericyte, a Müller cell, a ganglion cell (e.g., including a retinal ganglion cell), an endothelial cell, a photoreceptor cell, a retinal blood vessel (e.g., including endothelial cells and vascular smooth muscle cells), episcleral veins or choroid tissue, e.g., a choroid vessel) comprising a reduced level of CA2 mRNA or a level of CA2 protein as compared to an otherwise similar untreated cell. In some embodiments, the level is reduced by at least 10%, 15%, 20%, 25%, 30%, 35%, 40%, 45%, 50%, 55%, 60%, 65%, 70%, 75%, 80%, 85%, 90%, or 95%.

[0015] In some aspects, the present disclosure also provides a pharmaceutical composition for inhibiting expression of a gene encoding CA2, comprising a dsRNA agent described herein.

[0016] The present disclosure also provides, in some aspects, a method of inhibiting expression of CA2 in a cell, the method comprising:
[0017] (a) contacting the cell with the dsRNA agent described herein, or a pharmaceutical composition described herein; and
[0018] (b) maintaining the cell produced in step (a) for a time sufficient to obtain degradation of the mRNA transcript of CA2, thereby inhibiting expression of the CA2 in the cell.

[0019] The present disclosure also provides, in some aspects, a method of inhibiting expression of CA2 in a cell, the method comprising:
[0020] (a) contacting the cell with the dsRNA agent described herein, or a pharmaceutical composition described herein; and
[0021] (b) maintaining the cell produced in step (a) for a time sufficient to reduce levels of CA2 mRNA, CA2 protein, or both of CA2 mRNA and protein, thereby inhibiting expression of the CA2 in the cell.

[0022] The present disclosure also provides, in some aspects, a method of inhibiting expression of CA2 in an ocular cell or tissue, the method comprising:
[0023] (a) contacting the cell or tissue with a dsRNA agent that binds CA2; and
[0024] (b) maintaining the cell or tissue produced in step (a) for a time sufficient to reduce levels of CA2 mRNA, CA2 protein, or both of CA2 mRNA and protein, thereby inhibiting expression of CA2 in the cell or tissue.

[0025] The present disclosure also provides, in some aspects, a method of treating a subject diagnosed with a CA2-associated disorder comprising administering to the subject a therapeutically effective amount of the dsRNA agent described herein or a pharmaceutical composition described herein, thereby treating the disorder.

[0026] In any of the aspects herein, e.g., the compositions and methods above, any of the embodiments herein (e.g, below) may apply.

[0027] In some embodiments, the coding strand of human CA2 has the sequence of SEQ ID NO: 1. In some embodiments, the non-coding strand of human CA2 has the sequence of SEQ ID NO: 2.

[0028] In some embodiments, the sense strand comprises a nucleotide sequence comprising at least 15 contiguous nucleotides, with 0, or 1, 2, or 3 mismatches, of the corresponding portion of the nucleotide sequence of SEQ ID NO: 1.

[0029] In some embodiments, the dsRNA agent comprises a sense strand and an antisense strand, wherein the antisense strand comprises a nucleotide sequence comprising at least 17 contiguous nucleotides, with 0, 1, 2, or 3 mismatches, of a portion of nucleotide sequence of SEQ ID NO: 2 such that the sense strand is complementary to the at least 17 contiguous nucleotides in the antisense strand. In some embodiments, the sense strand comprises a nucleotide sequence comprising at least 17 contiguous nucleotides, with 0, or 1, 2, or 3 mismatches, of the corresponding portion of the nucleotide sequence of SEQ ID NO: 1.

[0030] In some embodiments, the dsRNA agent comprises a sense strand and an antisense strand, wherein the antisense strand comprises a nucleotide sequence comprising at least 19 contiguous nucleotides, with 0, 1, 2, or 3 mismatches, of a portion of nucleotide sequence of SEQ ID NO: 2 such that the sense strand is complementary to the at least 19 contiguous nucleotides in the antisense strand. In some embodiments, the sense strand comprises a nucleotide sequence comprising at least 19 contiguous nucleotides, with 0, 1, 2, or 3 mismatches, of the corresponding portion of the nucleotide sequence of SEQ ID NO: 1.

[0031] In some embodiments, the dsRNA agent comprises a sense strand and an antisense strand, wherein the antisense strand comprises a nucleotide sequence comprising at least 21 contiguous nucleotides, with 0, 1, 2, or 3 mismatches, of a portion of nucleotide sequence of SEQ ID NO: 2 such that the sense strand is complementary to the at least 21 contiguous nucleotides in the antisense strand. In some embodiments, the sense strand comprises a nucleotide sequence comprising at least 21 contiguous nucleotides, with 0, or 1, 2, or 3 mismatches, of the corresponding portion of the nucleotide sequence of SEQ ID NO: 1.

[0032] In some embodiments, the portion of the sense strand is a portion within a sense strand in any one of Tables 3-10.

[0033] In some embodiments, the portion of the antisense strand is a portion within an antisense strand in any one of Tables 3-10.

[0034] In some embodiments, the antisense strand comprises a nucleotide sequence comprising at least 15 contiguous nucleotides, with 0, 1, 2, or 3 mismatches, from one of the antisense sequences listed in any one of Tables 3-10. In some embodiments, the sense strand comprises a nucleotide sequence comprising at least 15 contiguous nucleotides, with 0, 1, 2, or 3 mismatches, from a sense sequence listed in any one of Tables 3-10 that corresponds to the antisense sequence.

[0035] In some embodiments, the antisense strand comprises a nucleotide sequence comprising at least 17 contiguous nucleotides, with 0, 1, 2, or 3 mismatches, from one of the antisense sequences listed in any one of Tables 3-10. In some embodiments, the sense strand comprises a nucleotide sequence comprising at least 17 contiguous nucleotides, with 0, 1, 2, or 3 mismatches, from a sense sequence listed in any one of Tables 3-10 that corresponds to the antisense sequence.

[0036] In some embodiments, the antisense strand comprises a nucleotide sequence comprising at least 19 contiguous nucleotides, with 0, 1, 2, or 3 mismatches, from one of the antisense sequences listed in any one of Tables 3-10. In some embodiments, the sense strand comprises a nucleotide sequence comprising at least 19 contiguous nucleotides, with 0, 1, 2, or 3 mismatches, from a sense sequence listed in any one of Tables 3-10 that corresponds to the antisense sequence.

[0037] In some embodiments, the antisense strand comprises a nucleotide sequence comprising at least 21 contiguous nucleotides, with 0, 1, 2, or 3 mismatches, from one of the antisense sequences listed in any one of Tables 3-10. In some embodiments, the sense strand comprises a nucleotide sequence comprising at least 21 contiguous nucleotides, with 0, 1, 2, or 3 mismatches, from a sense sequence listed in any one of Tables 3-10 that corresponds to the antisense sequence.

[0038] In some embodiments, the sense strand of the dsRNA agent is at least 23 nucleotides in length, e.g., 23-30 nucleotides in length.

[0039] In some embodiments, at least one of the sense strand and the antisense strand is conjugated to one or more lipophilic moieties. In some embodiments, the lipophilic moiety is conjugated to one or more positions in the double stranded region of the dsRNA agent. In some embodiments, the lipophilic moiety is conjugated via a linker or carrier. In some embodiments, lipophilicity of the lipophilic moiety, measured by log Kow, exceeds 0. In some embodiments, In some embodiments, the hydrophobicity of the double-stranded RNAi agent, measured by the unbound fraction in a plasma protein binding assay of the double-stranded RNAi agent, exceeds 0.2. In some embodiments, the plasma protein binding assay is an electrophoretic mobility shift assay using human serum albumin protein.

[0040] In some embodiments, the dsRNA agent comprises at least one modified nucleotide. In some embodiments, no more than five of the sense strand nucleotides and not more than five of the nucleotides of the antisense strand are unmodified nucleotides. In some embodiments, all of the nucleotides of the sense strand and all of the nucleotides of the antisense strand comprise a modification.

[0041] In some embodiments, at least one of the modified nucleotides is selected from the group consisting of a deoxy-nucleotide, a 3′-terminal deoxythimidine (dT) nucleotide, a 2′-O-methyl modified nucleotide, a 2′-fluoro modified nucleotide, a 2′-deoxy-modified nucleotide, a locked nucleotide, an unlocked nucleotide, a conformationally restricted nucleotide, a constrained ethyl nucleotide, an abasic nucleotide, a 2′-amino-modified nucleotide, a 2′-O-allyl-modified nucleotide, 2′-C-alkyl-modified nucleotide, a 2′-methoxyethyl modified nucleotide, a 2′-O-alkyl-modified nucleotide, a morpholino nucleotide, a phosphoramidate, a non-natural base comprising nucleotide, a tetrahydropyran modified nucleotide, a 1,5-anhydrohexitol modified nucleotide, a cyclohexenyl modified nucleotide, a nucleotide comprising a phosphorothioate group, a nucleotide comprising a methylphosphonate group, a nucleotide comprising a 5′-phosphate, a nucleotide comprising a 5′-phosphate mimic, a glycol modified nucleotide, and a 2-O—(N-methylacetamide) modified nucleotide; and combinations thereof. In some embodiments, no more than five of the sense strand nucleotides and not more than five of the nucleotides of the antisense strand include modifications other than 2′-O-methyl modified nucleotide, a 2′-fluoro modified nucleotide, a 2′-deoxy-modified nucleotide, unlocked nucleic acids (UNA) or glycerol nucleic acid (GNA).

[0042] In some embodiments, the dsRNA comprises a non-nucleotide spacer (wherein optionally the non-nucleotide spacer comprises a C3-C6 alkyl) between two of the contiguous nucleotides of the sense strand or between two of the contiguous nucleotides of the antisense strand.

[0043] In some embodiments, each strand is no more than 30 nucleotides in length. In some embodiments, at least one strand comprises a 3′ overhang of at least 1 nucleotide. In some embodiments, at least one strand comprises a 3′ overhang of at least 2 nucleotides. In some embodiments, at least one strand comprises a 3′ overhang of 2 nucleotides.

[0044] In some embodiments, the double stranded region is 15-30 nucleotide pairs in length. In some embodiments, the double stranded region is 17-23 nucleotide pairs in length. In some embodiments, the double stranded region is 17-25 nucleotide pairs in length. In some embodiments, the double stranded region is 23-27 nucleotide pairs in length. In some embodiments, the double stranded region is 19-21 nucleotide pairs in length. In some embodiments, the double stranded region is 21-23 nucleotide pairs in length. In some embodiments, each strand has 19-30 nucleotides. In some embodiments, each strand has 19-23 nucleotides. In some embodiments, each strand has 21-23 nucleotides.

[0045] In some embodiments, the agent comprises at least one phosphorothioate or methylphosphonate internucleotide linkage. In some embodiments, the phosphorothioate or methylphosphonate internucleotide linkage is at the 3′-terminus of one strand. In some embodiments, the strand is the antisense strand. In some embodiments, the strand is the sense strand.

[0046] In some embodiments, the phosphorothioate or methylphosphonate internucleotide linkage is at the 5′-terminus of one strand. In some embodiments, the strand is the antisense strand. In some embodiments, the strand is the sense strand.

[0047] In some embodiments, each of the 5′- and 3′-terminus of one strand comprises a phosphorothioate or methylphosphonate internucleotide linkage. In some embodiments, the strand is the antisense strand.

[0048] In some embodiments, the base pair at the 1 position of the 5′-end of the antisense strand of the duplex is an AU base pair.

[0049] In some embodiments, the sense strand has a total of 21 nucleotides and the antisense strand has a total of 23 nucleotides. In some embodiments, one or more lipophilic moieties are conjugated to one or more internal positions on at least one strand. In some embodiments, the one or more lipophilic moieties are conjugated to one or more internal positions on at least one strand via a linker or carrier.

[0050] In some embodiments conjugating a lipophilic moiety to one or more internal positions on at least one strand of the double-stranded iRNA agent provides surprisingly good results for in vivo intravitreal delivery of the double-stranded iRNAs, resulting in efficient entry into ocular tissues. Examples and synthesis of lipophilic moieties are listed in PCT application number PCT/US2019/031170 which is hereby incorporated by reference in its entirety.

[0051] In some embodiments, the internal positions include all positions except the terminal two positions from each end of the at least one strand. In some embodiments, the internal positions include all positions except the terminal three positions from each end of the at least one strand. In some embodiments, the internal positions exclude a cleavage site region of the sense strand. In some embodiments, the internal positions include all positions except positions 9-12, counting from the 5′-end of the sense strand. In some embodiments, the internal positions include all positions except positions 11-13, counting from the 3′-end of the sense strand. In some embodiments, the internal positions exclude a cleavage site region of the antisense strand. In some embodiments, the internal positions include all positions except positions 12-14, counting from the 5′-end of the antisense strand. In some embodiments, the internal positions include all positions except positions 11-13 on the sense strand, counting from the 3′-end, and positions 12-14 on the antisense strand, counting from the 5′-end.

[0052] In some embodiments, the one or more lipophilic moieties are conjugated to one or more of the internal positions selected from the group consisting of positions 4-8 and 13-18 on the sense strand, and positions 6-10 and 15-18 on the antisense strand, counting from the 5′end of each strand. In some embodiments, the one or more lipophilic moieties are conjugated to one or more of the internal positions selected from the group consisting of positions 5, 6, 7, 15, and 17 on the sense strand, and positions 15 and 17 on the antisense strand, counting from the 5′-end of each strand.

[0053] In some embodiments, the positions in the double stranded region exclude a cleavage site region of the sense strand.

[0054] In some embodiments, the sense strand is 21 nucleotides in length, the antisense strand is 23 nucleotides in length, and the lipophilic moiety is conjugated to position 21, position 20, position 15, position 1, position 7, position 6, or position 2 of the sense strand or position 16 of the antisense strand. In some embodiments, the lipophilic moiety is conjugated to position 21, position 20, position 15, position 1, or position 7 of the sense strand. In some embodiments, the lipophilic moiety is conjugated to position 21, position 20, or position 15 of the sense strand. In some embodiments, the lipophilic moiety is conjugated to position 20 or position 15 of the sense strand. In some embodiments, the lipophilic moiety is conjugated to position 16 of the antisense strand. In some embodiments, the lipophilic moiety is conjugated to position 6, counting from the 5′-end of the sense strand. In one embodiment, the saturated or unsaturated C16 hydrocarbon chain is conjugated to position 6, counting from the 5′-end of the strand

[0055] In some embodiments, the lipophilic moiety is an aliphatic, alicyclic, or polyalicyclic compound. In some embodiments, the lipophilic moiety is selected from the group consisting of lipid, cholesterol, retinoic acid, cholic acid, adamantane acetic acid, 1-pyrene butyric acid, dihydrotestosterone, 1,3-bis-O(hexadecyl)glycerol, geranyloxyhexyanol, hexadecylglycerol, borneol, menthol, 1,3-propanediol, heptadecyl group, palmitic acid, myristic acid, O3-(oleoyl)lithocholic acid, O3-(oleoyl)cholenic acid, dimethoxytrityl, or phenoxazine. Suitable lipophilic moieties also include those containing a saturated or unsaturated C4-C30 hydrocarbon chain (e.g., C4-C30 alkyl or alkenyl), and an optional functional group selected from the group consisting of hydroxyl, amine, carboxylic acid, sulfonate, phosphate, thiol, azide, and alkyne. The functional groups are useful to attach the lipophilic moiety to the iRNA agent. In some embodiments, the lipophilic moiety contains a saturated or unsaturated C6-C18 hydrocarbon chain (e.g., a linear C6-C18 alkyl or alkenyl). In one embodiment, the lipophilic moiety contains a saturated or unsaturated C16 hydrocarbon chain (e.g., a linear C16 alkyl or alkenyl).

[0056] In some embodiments, the lipophilic moiety is a C6-C30 acid (e.g., hexanoic acid, heptanoic acid, octanoic acid, nonanoic acid, decanoic acid, undecanoic acid, dodcanoic acid, tridecanoic acid, tetradecanoic acid, pentadecanoic acid, hexadecanoic acid, heptadecanoic acid, octadecanoic acid, oleic acid, linoleic acid, arachidonic acid, cis-4,7,10,13,16,19-docosahexanoic acid, vitamin A, vitamin E, cholesterol etc.) or a C6-C30 alcohol (e.g., hexanol, heptanol, octanol, nonanol, decanol, undecanol, dodcanol, tridecanol, tetradecanol, pentadecanol, hexadecanol, heptadecanol, octadecanol, oleyl alcohol, linoleyl alcohol, arachidonic alcohol, cis-4,7,10,13,16,19-docosahexanol, retinol, vitamin E, cholesterol etc.).

[0057] In one embodiment, the ligand is conjugated at the 2′-position of a nucleotide or modified nucleotide within the sense or antisense strand. For example, a C16 ligand may be conjugated as shown in the following structure:

[chemical structure]

[0058] where * denotes a bond to an adjacent nucleotide, and B is a nucleobase or a nucleobase analog, optionally where B is adenine, guanine, cytosine, thymine or uracil.

[0059] In some embodiments, the lipophilic moiety is conjugated via a carrier that replaces one or more nucleotide(s) in the internal position(s) or the double stranded region. In some embodiments, the carrier is a cyclic group selected from the group consisting of pyrrolidinyl, pyrazolinyl, pyrazolidinyl, imidazolinyl, imidazolidinyl, piperidinyl, piperazinyl, [1,3]dioxolanyl, oxazolidinyl, isoxazolidinyl, morpholinyl, thiazolidinyl, isothiazolidinyl, quinoxalinyl, pyridazinonyl, tetrahydrofuranyl, and decalinyl; or is an acyclic moiety based on a serinol backbone or a diethanolamine backbone.

[0060] In some embodiments, the lipophilic moiety is conjugated to the double-stranded iRNA agent via a linker containing an ether, thioether, urea, carbonate, amine, amide, maleimide-thioether, disulfide, phosphodiester, sulfonamide linkage, a product of a click reaction, or carbamate.

[0061] In some embodiments, the lipophilic moiety is conjugated to a nucleobase, sugar moiety, or internucleosidic linkage.

[0062] In some embodiments, the lipophilic moiety or targeting ligand is conjugated via a bio-cleavable linker selected from the group consisting of DNA, RNA, disulfide, amide, functionalized monosaccharides or oligosaccharides of galactosamine, glucosamine, glucose, galactose, mannose, and combinations thereof.

[0063] In some embodiments, the 3′ end of the sense strand is protected via an end cap which is a cyclic group having an amine, said cyclic group being selected from the group consisting of pyrrolidinyl, pyrazolinyl, pyrazolidinyl, imidazolinyl, imidazolidinyl, piperidinyl, piperazinyl, [1,3]dioxolanyl, oxazolidinyl, isoxazolidinyl, morpholinyl, thiazolidinyl, isothiazolidinyl, quinoxalinyl, pyridazinonyl, tetrahydrofuranyl, and decalinyl.

[0064] In some embodiments, the dsRNA agent further comprises a targeting ligand, e.g., a ligand that targets an ocular tissue. In some embodiments, the ocular tissue is ciliary epithelium, an optic nerve, a trabecular meshwork, a juxtacanalicular tissue, a ganglion (e.g., including a retinal ganglion), episcleral veins or a Schlemm's canal (e.g., including an endothelial cell).

[0065] In some embodiments, the ligand is conjugated to the sense strand. In some embodiments, the ligand is conjugated to the 3′ end or the 5′ end of the sense strand. In some embodiments, the ligand is conjugated to the 3′ end of the sense strand.

[0066] In some embodiments, the ligand comprises N-acetylgalactosamine (GalNAc). In some embodiments, the targeting ligand comprises one or more GalNAc conjugates or one or more GalNAc derivatives. In some embodiments, the ligand is one or more GalNAc conjugates or one or more GalNAc derivatives are attached through a monovalent linker, or a bivalent, trivalent, or tetravalent branched linker. In some embodiments, the ligand is

[chemical structure]

In some embodiments, the dsRNA agent is conjugated to the ligand as shown in the following schematic

[chemical structure]

[0067] wherein X is O or S. In some embodiments, the X is O.

[0068] In some embodiments, the dsRNA agent further comprises a terminal, chiral modification occurring at the first internucleotide linkage at the 3′ end of the antisense strand, having the linkage phosphorus atom in Sp configuration, a terminal, chiral modification occurring at the first internucleotide linkage at the 5′ end of the antisense strand, having the linkage phosphorus atom in Rp configuration, and a terminal, chiral modification occurring at the first internucleotide linkage at the 5′ end of the sense strand, having the linkage phosphorus atom in either Rp configuration or Sp configuration.

[0069] In some embodiments, the dsRNA agent further comprises a terminal, chiral modification occurring at the first and second internucleotide linkages at the 3′ end of the antisense strand, having the linkage phosphorus atom in Sp configuration, a terminal, chiral modification occurring at the first internucleotide linkage at the 5′ end of the antisense strand, having the linkage phosphorus atom in Rp configuration, and a terminal, chiral modification occurring at the first internucleotide linkage at the 5′ end of the sense strand, having the linkage phosphorus atom in either Rp or Sp configuration.

[0070] In some embodiments, the dsRNA agent further comprises a terminal, chiral modification occurring at the first, second and third internucleotide linkages at the 3′ end of the antisense strand, having the linkage phosphorus atom in Sp configuration, a terminal, chiral modification occurring at the first internucleotide linkage at the 5′ end of the antisense strand, having the linkage phosphorus atom in Rp configuration, and a terminal, chiral modification occurring at the first internucleotide linkage at the 5′ end of the sense strand, having the linkage phosphorus atom in either Rp or Sp configuration.

[0071] In some embodiments, the dsRNA agent further comprises a terminal, chiral modification occurring at the first, and second internucleotide linkages at the 3′ end of the antisense strand, having the linkage phosphorus atom in Sp configuration, a terminal, chiral modification occurring at the third internucleotide linkages at the 3′ end of the antisense strand, having the linkage phosphorus atom in Rp configuration, a terminal, chiral modification occurring at the first internucleotide linkage at the 5′ end of the antisense strand, having the linkage phosphorus atom in Rp configuration, and a terminal, chiral modification occurring at the first internucleotide linkage at the 5′ end of the sense strand, having the linkage phosphorus atom in either Rp or Sp configuration.

[0072] In some embodiments, the dsRNA agent further comprises a terminal, chiral modification occurring at the first, and second internucleotide linkages at the 3′ end of the antisense strand, having the linkage phosphorus atom in Sp configuration, a terminal, chiral modification occurring at the first, and second internucleotide linkages at the 5′ end of the antisense strand, having the linkage phosphorus atom in Rp configuration, and a terminal, chiral modification occurring at the first internucleotide linkage at the 5′ end of the sense strand, having the linkage phosphorus atom in either Rp or Sp configuration.

[0073] In some embodiments, the dsRNA agent further comprises a phosphate or phosphate mimic at the 5′-end of the antisense strand. In some embodiments, the phosphate mimic is a 5′-vinyl phosphonate (VP).

[0074] In various embodiments of the aforementioned dsRNA agents, the dsRNA agent targets a hotspot region of an mRNA encoding CA2.

[0075] In another aspect, the present invention provides a dsRNA agent that targets a hotspot region of a carbonic anhydrase 2 (CA2) mRNA.

[0076] In some embodiments, a cell described herein, e.g., a human cell, was produced by a process comprising contacting a human cell with the dsRNA agent described herein.

[0077] In some embodiments, a pharmaceutical composition described herein comprises the dsRNA agent and a lipid formulation.

[0078] In some embodiments (e.g, embodiments of the methods described herein), the cell is within a subject. In some embodiments, the subject is a human. In some embodiments, the level of CA2 mRNA is inhibited by at least 50%. In some embodiments, the level of CA2 protein is inhibited by at least 50%. In some embodiments, the expression of CA2 is inhibited by at least 50%. In some embodiments, inhibiting expression of CA2 decreases the CA2 protein level in a biological sample (e.g., an optic nerve sample) from the subject by at least 30%, 40%, 50%, 60%, 70%, 80%, 90%, or 95%. In some embodiments, inhibiting expression of CA2 gene decreases the CA2 mRNA level in a biological sample (e.g., an optic nerve sample) from the subject by at least 30%, 40%, 50%, 60%, 70%, 80%, 90%, or 95%.

[0079] In some embodiments, the subject has been diagnosed with a CA2-associated disorder. In some embodiments, the subject meets at least one diagnostic criterion for a CA2-associated disorder. In some embodiments, the CA2 associated disorder is glaucoma or conditions associated with glaucoma.

[0080] In some embodiments, the ocular cell or tissue is a ciliary epithelium cell, an optic nerve cell, a trabecular meshwork cell, a Schlemm's canal cell (e.g., including an endothelial cell), a juxtacanalicular tissue cell, a ciliary muscle cell, a retinal cell, an astrocyte, a pericyte, a Müller cell, a ganglion cell (e.g., including a retinal ganglion cell), an endothelial cell, a photoreceptor cell, a retinal blood vessel (e.g., including endothelial cells and vascular smooth muscle cells), episcleral veins or choroid tissue, e.g., a choroid vessel.

[0081] In some embodiments, the CA2-associated disorder is glaucoma and/or conditions associated with glaucoma.

[0082] In some embodiments, treating comprises amelioration of at least one sign or symptom of the disorder. In some embodiments, the at least one sign or symptom includes a measure of one or more of intraocular pressure, vision loss, optic nerve damage, ocular inflammation, visual acuity, or presence, level, or activity of CA2 (e.g., CA2 gene, CA2 mRNA, or CA2 protein).

[0083] In some embodiments, a level of the CA2 that is higher than a reference level is indicative that the subject has glaucoma or a glaucoma associated condition. In some embodiments, treating comprises prevention of progression of the disorder. In some embodiments, the treating comprises one or more of (a) inhibiting or reducing intraocular pressure; (b) inhibiting or reducing the expression or activity of CA2; (c) decreasing the amount of aqueous humor; (d) inhibiting or reducing optic nerve damage; or (e) inhibiting or reducing retinal ganglion cell death.

[0084] In some embodiments, the treating results in at least a 30% mean reduction from baseline of CA2 mRNA in the cell or tissue. In some embodiments, the treating results in at least a 60% mean reduction from baseline of CA2 mRNA in the cell or tissue. In some embodiments, the treating results in at least a 90% mean reduction from baseline of CA2 mRNA in the cell or tissue.

[0085] In some embodiments, after treatment the subject experiences at least an 8-week duration of knockdown following a single dose of dsRNA as assessed by CA2 protein in, for example, the ciliary epithelium. In some embodiments, treating results in at least a 12-week duration of knockdown following a single dose of dsRNA as assessed by CA2 protein in, for example, the ciliary epithelium. In some embodiments, treating results in at least a 16-week duration of knockdown following a single dose of dsRNA as assessed by CA2 protein in, for example, the ciliary epithelium.

[0086] In some embodiments, the subject is human.

[0087] In some embodiments, the dsRNA agent is administered at a dose of about 0.01 mg/kg to about 50 mg/kg.

[0088] In some embodiments, the dsRNA agent is administered to the subject intraocularly. In some embodiments, the intraocular administration comprises intravitreal administration, e.g., intravitreal injection; transscleral administration, e.g., transscleral injection; subconjunctival administration, e.g., subconjunctival injection; retrobulbar administration, e.g., retrobulbar injection; intracameral administration, e.g., intracameral injection, or subretinal administration, e.g., subretinal injection.

[0089] In some embodiments, the dsRNA agent is administered to the subject intravenously. In some embodiments, the dsRNA agent is administered to the subject topically.

[0090] In some embodiments, a method described herein further comprises measuring a level of CA2 (e.g., CA2 gene, CA2 mRNA, or CA2 protein) in the subject. In some embodiments, measuring the level of CA2 in the subject comprises measuring the level of CA2 protein in a biological sample from the subject (e.g., a ciliary epithelium sample). In some embodiments, a method described herein further comprises performing a blood test, an imaging test, a tonometry test or a ciliary epithelium biopsy.

[0091] In some embodiments, a method described herein further comprises measuring a level of CA2 (e.g., CA2 gene, CA2 mRNA, or CA2 protein) in the subject prior to treatment with the dsRNA agent or the pharmaceutical composition. In some embodiments, upon determination that a subject has a level of CA2 that is greater than a reference level, the dsRNA agent or the pharmaceutical composition is administered to the subject. In some embodiments, measuring a level of CA2 in the subject is performed after treatment with the dsRNA agent or the pharmaceutical composition.

[0092] In some embodiments, a method described herein further comprises treating the subject with a therapy suitable for treatment or prevention of a CA2-associated disorder, e.g., glaucoma, wherein the therapy comprises medication to reduce intraocular pressure, laser treatment, surgery or trabeculectomy. In some embodiments, a method described herein further comprises administering to the subject an additional agent suitable for treatment or prevention of a CA2-associated disorder. In some embodiments, the additional agent comprises a prostaglandin analog, a beta blocker, an alpha-adrenergic agonist, a carbonic anhydrase inhibitor, or an anti-CA2 agent.

[0093] In some embodiments, the anti-CA2 agent comprises an anti-CA2 antibody or antigen-binding fragment thereof (e.g., an anti-CA2 antibody molecule).

[0094] All publications, patent applications, patents, and other references mentioned herein are incorporated by reference in their entirety.

[0095] The details of various embodiments of the disclosure are set forth in the description below. Other features, objects, and advantages of the disclosure will be apparent from the description and the drawings, and from the claims.

### DETAILED DESCRIPTION

[0096] iRNA directs the sequence-specific degradation of mRNA through a process known as RNA interference (RNAi). Described herein are iRNAs and methods of using them for modulating (e.g., inhibiting) the expression of CA2. Also provided are compositions and methods for treatment of disorders related to CA2 expression, such as glaucoma or conditions associated with glaucoma.

[0097] Human CA2, also known as carbonic anhydrase 2, is a metalloenzyme encoded by the CA2 gene. CA2 catalyzes the interconversion between carbon dioxide and bicarbonate. CA2 is expressed by a variety of tissues including tissues of the eye, such as, ciliary epithelium, corneal epithelium, Müller cells, the lens, non-pigmented iris epithelium, retinal pigment epithelium, and pigmented and non-pigmented epithelium of the ciliary processes.

[0098] Without wishing to be bound by theory, CA2 may exacerbate the pathogenesis of glaucoma, e.g., by increasing intraocular pressure. CA2 appears to be the main CA form expressed in human ciliary epithelium which is responsible for producing aqueous humor. Carbonic anhydrase inhibitors have been shown to reduce aqueous humor production by up to 40% and thereby reduce intraocular pressure in the eye.

[0099] The following description discloses how to make and use compositions containing iRNAs to modulate (e.g., inhibit) the expression of CA2, as well as compositions and methods for treating disorders related to expression of CA2.

[0100] In some aspects, pharmaceutical compositions containing CA2 iRNA and a pharmaceutically acceptable carrier, methods of using the compositions to inhibit expression of CA2, and methods of using the pharmaceutical compositions to treat disorders related to expression of CA2 (e.g., glaucoma or conditions associated with glaucoma) are featured herein.

### I. Definitions

[0101] For convenience, the meaning of certain terms and phrases used in the specification, examples, and appended claims, are provided below. If there is an apparent discrepancy between the usage of a term in other parts of this specification and its definition provided in this section, the definition in this section shall prevail.

[0102] The term “about” when referring to a number or a numerical range means that the number or numerical range referred to is an approximation within experimental variability (or within statistical experimental error), and thus the number or numerical range may vary from, for example, between 1% and 15% of the stated number or numerical range.

[0103] The term “at least” prior to a number or series of numbers is understood to include the number adjacent to the term “at least”, and all subsequent numbers or integers that could logically be included, as clear from context. For example, the number of nucleotides in a nucleic acid molecule must be an integer. For example, “at least 17 nucleotides of a 20-nucleotide nucleic acid molecule” means that 17, 18, 19, or 20 nucleotides have the indicated property. When at least is present before a series of numbers or a range, it is understood that “at least” can modify each of the numbers in the series or range.

[0104] As used herein, “no more than” or “or less” is understood as the value adjacent to the phrase and logical lower values or integers, as logical from context, to zero. For example, a duplex with mismatches to a target site of “no more than 2 nucleotides” has a 2, 1, or 0 mismatches. When “no more than” is present before a series of numbers or a range, it is understood that “no more than” can modify each of the numbers in the series or range.

[0105] As used herein, “up to” as in “up to 10” is understood as up to and including 10, i.e., 0, 1, 2, 3, 4, 5, 6, 7, 8, 9, or 10.

[0106] Ranges provided herein are understood to include all individual integer values and all subranges within the ranges.

[0107] The terms “activate,” “enhance,” “up-regulate the expression of,” “increase the expression of,” and the like, in so far as they refer to a CA2 gene, herein refer to the at least partial activation of the expression of a CA2 gene, as manifested by an increase in the amount of CA2 mRNA, which may be isolated from or detected in a first cell or group of cells in which a CA2 gene is transcribed and which has or have been treated such that the expression of a CA2 gene is increased, as compared to a second cell or group of cells substantially identical to the first cell or group of cells but which has or have not been so treated (control cells).

[0108] In some embodiments, expression of a CA2 gene is activated by at least about 10%, 15%, 20%, 25%, 30%, 35%, 40%, 45%, or 50% by administration of an iRNA as described herein. In some embodiments, a CA2 gene is activated by at least about 60%, 70%, or 80% by administration of an iRNA featured in the disclosure. In some embodiments, expression of a CA2 gene is activated by at least about 85%, 90%, or 95% or more by administration of an iRNA as described herein. In some embodiments, the CA2 gene expression is increased by at least 1-fold, at least 2-fold, at least 5-fold, at least 10-fold, at least 50-fold, at least 100-fold, at least 500-fold, at least 1000-fold or more in cells treated with an iRNA as described herein compared to the expression in an untreated cell. Activation of expression by small dsRNAs is described, for example, in Li et al., 2006 Proc. Natl. Acad. Sci. U.S.A. 103:17337-42, and in US2007/0111963 and US2005/226848, each of which is incorporated herein by reference.

[0109] The terms “silence,” “inhibit expression of,” “down-regulate expression of,” “suppress expression of,” and the like, in so far as they refer to CA2, herein refer to the at least partial suppression of the expression of CA2, as assessed, e.g., based on CA2 mRNA expression, CA2 protein expression, or another parameter functionally linked to CA2 expression. For example, inhibition of CA2 expression may be manifested by a reduction of the amount of CA2 mRNA which may be isolated from or detected in a first cell or group of cells in which CA2 is transcribed and which has or have been treated such that the expression of CA2 is inhibited, as compared to a control. The control may be a second cell or group of cells substantially identical to the first cell or group of cells, except that the second cell or group of cells have not been so treated (control cells). The degree of inhibition is usually expressed as a percentage of a control level, e.g.,

$$\frac{( mRNA in control cells ) - ( mRNA in treated cells )}{( mRNA in control cells )} \cdot 100 \%$$

[0110] Alternatively, the degree of inhibition may be given in terms of a reduction of a parameter that is functionally linked to CA2 expression, e.g., the amount of protein encoded by a CA2 gene. The reduction of a parameter functionally linked to CA2 expression may similarly be expressed as a percentage of a control level. In principle, CA2 silencing may be determined in any cell expressing CA2, either constitutively or by genomic engineering, and by any appropriate assay.

[0111] For example, in certain instances, expression of CA2 is suppressed by at least about 10%, 15%, 20%, 25%, 30%, 35%, 40%, 45%, or 50% by administration of an iRNA disclosed herein. In some embodiments, CA2 is suppressed by at least about 60%, 65%, 70%, 75%, or 80% by administration of an iRNA disclosed herein. In some embodiments, CA2 is suppressed by at least about 85%, 90%, 95%, 98%, 99%, or more by administration of an iRNA as described herein.

[0112] The term “antisense strand” or “guide strand” refers to the strand of an iRNA, e.g., a dsRNA, which includes a region that is substantially complementary to a target sequence.

[0113] As used herein, the term “region of complementarity” refers to the region on the antisense strand that is substantially complementary to a sequence, for example a target sequence, as defined herein. Where the region of complementarity is not fully complementary to the target sequence, the mismatches may be in the internal or terminal regions of the molecule. In some embodiments, the region of complementarity comprises 0, 1, or 2 mismatches.

[0114] The term “sense strand” or “passenger strand” as used herein, refers to the strand of an iRNA that includes a region that is substantially complementary to a region of the antisense strand as that term is defined herein.

[0115] The terms “blunt” or “blunt ended” as used herein in reference to a dsRNA mean that there are no unpaired nucleotides or nucleotide analogs at a given terminal end of a dsRNA, i.e., no nucleotide overhang. One or both ends of a dsRNA can be blunt. Where both ends of a dsRNA are blunt, the dsRNA is said to be blunt ended. To be clear, a “blunt ended” dsRNA is a dsRNA that is blunt at both ends, i.e., no nucleotide overhang at either end of the molecule. Most often such a molecule will be double-stranded over its entire length.

[0116] As used herein, and unless otherwise indicated, the term “complementary,” when used to describe a first nucleotide sequence in relation to a second nucleotide sequence, refers to the ability of an oligonucleotide or polynucleotide comprising the first nucleotide sequence to hybridize and form a duplex structure under certain conditions with an oligonucleotide or polynucleotide comprising the second nucleotide sequence, as will be understood by the skilled person. Such conditions can be, for example, “stringent conditions”, including but not limited to, 400 mM NaCl, 40 mM PIPES pH 6.4, 1 mM EDTA, 50° C. or 70° C. for 12-16 hours followed by washing. As used herein, “stringent conditions” or “stringent hybridization conditions” refers to conditions under which an antisense compound will hybridize to its target sequence, but to a minimal number of other sequences. Stringent conditions are sequence-dependent and will be different in different circumstances, and “stringent conditions” under which antisense compounds hybridize to a target sequence are determined by the nature and composition of the antisense compounds and the assays in which they are being investigated. Other conditions, such as physiologically relevant conditions as may be encountered inside an organism, can apply. The skilled person will be able to determine the set of conditions most appropriate for a test of complementarity of two sequences in accordance with the ultimate application of the hybridized nucleotides.

[0117] Complementary sequences within an iRNA, e.g., within a dsRNA as described herein, include base-pairing of the oligonucleotide or polynucleotide comprising a first nucleotide sequence to an oligonucleotide or polynucleotide comprising a second nucleotide sequence over the entire length of one or both nucleotide sequences. Such sequences can be referred to as “fully complementary” with respect to each other herein. However, where a first sequence is referred to as “substantially complementary” with respect to a second sequence herein, the two sequences can be fully complementary, or they may form one or more, but generally not more than 5, 4, 3 or 2 mismatched base pairs upon hybridization for a duplex up to 30 base pairs. In some embodiments, the “substantially complementary” sequences disclosed herein comprise a contiguous nucleotide sequence which is at least about 80% complementary over its entire length to the equivalent region of the target GPR146 sequence, such as about 85%, about 90%, about 91%, about 92%, about 93%, about 94%, about 95%, about 96%, about 97%, about 98%, or about 99% complementary. However, where two oligonucleotides are designed to form, upon hybridization, one or more single stranded overhangs, such overhangs shall not be regarded as mismatches with regard to the determination of complementarity. For example, a dsRNA comprising one oligonucleotide 21 nucleotides in length and another oligonucleotide 23 nucleotides in length, wherein the longer oligonucleotide comprises a sequence of 21 nucleotides that is fully complementary to the shorter oligonucleotide, may yet be referred to as “fully complementary” for the purposes described herein.

[0118] Complementary sequences, as used herein, may also include, or be formed entirely from, non-Watson-Crick base pairs and/or base pairs formed from non-natural and modified nucleotides, in as far as the above requirements with respect to their ability to hybridize are fulfilled. Such non-Watson-Crick base pairs includes, but are not limited to, G:U Wobble or Hoogsteen base pairing.

[0119] The terms “complementary,” “fully complementary” and “substantially complementary” herein may be used with respect to the base matching between two oligonucleotides or polynucleotides, such as the sense strand and the antisense strand of a dsRNA, or between the antisense strand of an iRNA agent and a target sequence, as will be understood from the context of their use.

[0120] As used herein, a polynucleotide that is “substantially complementary to at least part of” a messenger RNA (mRNA) refers to a polynucleotide that is substantially complementary to a contiguous portion of the mRNA of interest (e.g., an mRNA encoding a CA2 protein). For example, a polynucleotide is complementary to at least a part of a CA2 mRNA if the sequence is substantially complementary to a non-interrupted portion of an mRNA encoding CA2. The term “complementarity” refers to the capacity for pairing between nucleobases of a first nucleic acid and a second nucleic acid.

[0121] As used herein, the term “region of complementarity” refers to the region of one nucleotide sequence agent that is substantially complementary to another sequence, e.g., the region of a sense sequence and corresponding antisense sequence of a dsRNA, or the antisense strand of an iRNA and a target sequence, e.g., a CA2 nucleotide sequence, as defined herein. Where the region of complementarity is not fully complementary to the target sequence, the mismatches can be in the internal or terminal regions of the antisense strand of the iRNA. Generally, the most tolerated mismatches are in the terminal regions, e.g., within 5, 4, 3, or 2 nucleotides of the 5′- or 3′-terminus of the iRNA agent.

[0122] “Contacting,” as used herein, includes directly contacting a cell, as well as indirectly contacting a cell. For example, a cell within a subject may be contacted when a composition comprising an iRNA is administered (e.g., intraocularly, topically, or intravenously) to the subject.

[0123] “Introducing into a cell,” when referring to an iRNA, means facilitating or effecting uptake or absorption into the cell. Absorption or uptake of an iRNA can occur through unaided diffusive or active cellular processes, or by auxiliary agents or devices. The meaning of this term is not limited to cells in vitro; an iRNA may also be “introduced into a cell,” wherein the cell is part of a living organism. In such an instance, introduction into the cell will include the delivery to the organism. For example, for in vivo delivery, iRNA can be injected into a tissue site or administered systemically. In vivo delivery can also be by a β-glucan delivery system, such as those described in U.S. Pat. Nos. 5,032,401 and 5,607,677, and U.S. Publication No. 2005/0281781, which are hereby incorporated by reference in their entirety. In vitro introduction into a cell includes methods known in the art such as electroporation and lipofection. Further approaches are described herein below or known in the art. As used herein, a “disorder related to CA2 expression,” a “disease related to CA2 expression,” a “pathological process related to CA2 expression,” “a CA2-associated disorder,” “a CA2-associated disease,” or the like includes any condition, disorder, or disease in which CA2 expression is altered (e.g., decreased or increased relative to a reference level, e.g., a level characteristic of a non-diseased subject). In some embodiments, CA2 expression is decreased. In some embodiments, CA2 expression is increased. In some embodiments, the decrease or increase in CA2 expression is detectable in a tissue sample from the subject (e.g., in an optic nerve sample). The decrease or increase may be assessed relative the level observed in the same individual prior to the development of the disorder or relative to other individual(s) who do not have the disorder. The decrease or increase may be limited to a particular organ, tissue, or region of the body (e.g., the eye). CA2-associated disorders include, but are not limited to, glaucoma or conditions associated with glaucoma.

[0124] The term “condition(s) associated with glaucoma,” as used herein, means any disease or condition that is associated with an increase in intraocular pressure. Non-limiting examples of conditions associated with glaucoma that are treatable using methods provided herein include glaucoma, open-angle glaucoma, angle-closure glaucoma, ocular inflammation, systemic inflammation, anterior uveitis, acute retinal necrosis, Sturge-Weber syndrome, Axenfeld-Rieger syndrome, Marfan syndrome, homocystinuria, Weill-Marchesani syndrome, and autoimmune diseases, such as juvenile rheumatoid arthritis and Marie-Strumpell ankylosing spondylitis.

[0125] The term “double-stranded RNA,” “dsRNA,” or “siRNA” as used herein, refers to an iRNA that includes an RNA molecule or complex of molecules having a hybridized duplex region that comprises two anti-parallel and substantially complementary nucleic acid strands, which will be referred to as having “sense” and “antisense” orientations with respect to a target RNA. The duplex region can be of any length that permits specific degradation of a desired target RNA, e.g., through a RISC pathway, but will typically range from 9 to 36 base pairs in length, e.g., 15-30 base pairs in length. Considering a duplex between 9 and 36 base pairs, the duplex can be any length in this range, for example, 9, 10, 11, 12, 13, 14, 15, 16, 17, 18, 19, 20, 21, 22, 23, 24, 25, 26, 27, 28, 29, 30, 31, 32, 33, 34, 35, or 36 and any sub-range therein between, including, but not limited to 15-30 base pairs, 15-26 base pairs, 15-23 base pairs, 15-22 base pairs, 15-21 base pairs, 15-20 base pairs, 15-19 base pairs, 15-18 base pairs, 15-17 base pairs, 18-30 base pairs, 18-26 base pairs, 18-23 base pairs, 18-22 base pairs, 18-21 base pairs, 18-20 base pairs, 19-30 base pairs, 19-26 base pairs, 19-23 base pairs, 19-22 base pairs, 19-21 base pairs, 19-20 base pairs, 20-30 base pairs, 20-26 base pairs, 20-25 base pairs, 20-24 base pairs, 20-23 base pairs, 20-22 base pairs, 20-21 base pairs, 21-30 base pairs, 21-26 base pairs, 21-25 base pairs, 21-24 base pairs, 21-23 base pairs, or 21-22 base pairs. dsRNAs generated in the cell by processing with Dicer and similar enzymes are generally in the range of 19-22 base pairs in length. One strand of the duplex region of a dsDNA comprises a sequence that is substantially complementary to a region of a target RNA. The two strands forming the duplex structure can be from a single RNA molecule having at least one self-complementary region, or can be formed from two or more separate RNA molecules. Where the duplex region is formed from two strands of a single molecule, the molecule can have a duplex region separated by a single stranded chain of nucleotides (herein referred to as a “hairpin loop”) between the 3′-end of one strand and the 5′-end of the respective other strand forming the duplex structure. The hairpin loop can comprise at least one unpaired nucleotide; in some embodiments the hairpin loop can comprise at least 3, at least 4, at least 5, at least 6, at least 7, at least 8, at least 9, at least 10, at least 20, at least 23 or more unpaired nucleotides. Where the two substantially complementary strands of a dsRNA are comprised by separate RNA molecules, those molecules need not, but can be covalently connected. In some embodiments, the two strands are connected covalently by means other than a hairpin loop, and the connecting structure is a linker.

[0126] In some embodiments, the iRNA agent may be a “single-stranded siRNA” that is introduced into a cell or organism to inhibit a target mRNA. In some embodiments, single-stranded RNAi agents can bind to the RISC endonuclease Argonaute 2, which then cleaves the target mRNA. The single-stranded siRNAs are generally 15-30 nucleotides and are optionally chemically modified. The design and testing of single-stranded siRNAs are described in U.S. Pat. No. 8,101,348 and in Lima et al., (2012) Cell 150: 883-894, the entire contents of each of which are hereby incorporated herein by reference. Any of the antisense nucleotide sequences described herein (e.g., sequences provided in Tables 3-10) may be used as a single-stranded siRNA as described herein and optionally as chemically modified, e.g., as described herein, e.g., by the methods described in Lima et al., (2012) Cell 150:883-894.

[0127] In some embodiments, an RNA interference agent includes a single stranded RNA that interacts with a target RNA sequence to direct the cleavage of the target RNA. Without wishing to be bound by theory, long double stranded RNA introduced into cells is broken down into siRNA by a Type III endonuclease known as Dicer (Sharp et al., Genes Dev. 2001, 15:485). Dicer, a ribonuclease-III-like enzyme, processes the dsRNA into 19-23 base pair short interfering RNAs with characteristic two base 3′ overhangs (Bernstein, et al., (2001) Nature 409:363). The siRNAs are then incorporated into an RNA-induced silencing complex (RISC) where one or more helicases unwind the siRNA duplex, enabling the complementary antisense strand to guide target recognition (Nykanen, et al., (2001) Cell 107:309). Upon binding to the appropriate target mRNA, one or more endonucleases within the RISC cleaves the target to induce silencing (Elbashir, et al., (2001) Genes Dev. 15:188). Thus, in some embodiments, the disclosure relates to a single stranded RNA that promotes the formation of a RISC complex to effect silencing of the target gene.

[0128] “G,” “C,” “A,” “T” and “U” each generally stand for a nucleotide that contains guanine, cytosine, adenine, thymidine and uracil as a base, respectively. However, it will be understood that the terms “deoxyribonucleotide,” “ribonucleotide,” or “nucleotide” can also refer to a modified nucleotide, as further detailed below, or a surrogate replacement moiety. The skilled person is well aware that guanine, cytosine, adenine, and uracil may be replaced by other moieties without substantially altering the base pairing properties of an oligonucleotide comprising a nucleotide bearing such replacement moiety. For example, without limitation, a nucleotide comprising inosine as its base may base pair with nucleotides containing adenine, cytosine, or uracil. Hence, nucleotides containing uracil, guanine, or adenine may be replaced in the nucleotide sequences of dsRNA featured in the disclosure by a nucleotide containing, for example, inosine. In another example, adenine and cytosine anywhere in the oligonucleotide can be replaced with guanine and uracil, respectively to form G-U Wobble base pairing with the target mRNA. Sequences containing such replacement moieties are suitable for the compositions and methods featured in the disclosure.

[0129] As used herein, the term “iRNA,” “RNAi”, “iRNA agent,” or “RNAi agent” or “RNAi molecule” refers to an agent that contains RNA as that term is defined herein, and which mediates the targeted cleavage of an RNA transcript, e.g., via an RNA-induced silencing complex (RISC) pathway. In some embodiments, an iRNA as described herein effects inhibition of CA2 expression, e.g., in a cell or mammal. Inhibition of CA2 expression may be assessed based on a reduction in the level of CA2 mRNA or a reduction in the level of the CA2 protein.

[0130] The term “linker” or “linking group” means an organic moiety that connects two parts of a compound, e.g., covalently attaches two parts of a compound.

[0131] The term “lipophile” or “lipophilic moiety” broadly refers to any compound or chemical moiety having an affinity for lipids. One way to characterize the lipophilicity of the lipophilic moiety is by the octanol-water partition coefficient, log K_{ow}, where K_{ow} is the ratio of a chemical's concentration in the octanol-phase to its concentration in the aqueous phase of a two-phase system at equilibrium. The octanol-water partition coefficient is a laboratory-measured property of a substance. However, it may also be predicted by using coefficients attributed to the structural components of a chemical which are calculated using first-principle or empirical methods (see, for example, Tetko et al., J. Chem. Inf Comput. Sci. 41:1407-21 (2001), which is incorporated herein by reference in its entirety). It provides a thermodynamic measure of the tendency of the substance to prefer a non-aqueous or oily milieu rather than water (i.e. its hydrophilic/lipophilic balance). In principle, a chemical substance is lipophilic in character when its log K_{ow} exceeds 0. Typically, the lipophilic moiety possesses a log K_{ow} exceeding 1, exceeding 1.5, exceeding 2, exceeding 3, exceeding 4, exceeding 5, or exceeding 10. For instance, the log K_{ow} of 6-amino hexanol, for instance, is predicted to be approximately 0.7. Using the same method, the log K_{ow} of cholesteryl N-(hexan-6-ol) carbamate is predicted to be 10.7.

[0132] The lipophilicity of a molecule can change with respect to the functional group it carries. For instance, adding a hydroxyl group or amine group to the end of a lipophilic moiety can increase or decrease the partition coefficient (e.g., log K_{ow}) value of the lipophilic moiety.

[0133] Alternatively, the hydrophobicity of the double-stranded RNAi agent, conjugated to one or more lipophilic moieties, can be measured by its protein binding characteristics. For instance, in certain embodiments, the unbound fraction in the plasma protein binding assay of the double-stranded RNAi agent could be determined to positively correlate to the relative hydrophobicity of the double-stranded RNAi agent, which could then positively correlate to the silencing activity of the double-stranded RNAi agent.

[0134] In some embodiments, the plasma protein binding assay determined is an electrophoretic mobility shift assay (EMSA) using human serum albumin protein. An exemplary protocol of this binding assay is illustrated in detail in, e.g., PCT/US2019/031170. The hydrophobicity of the double-stranded RNAi agent, measured by fraction of unbound siRNA in the binding assay, exceeds 0.15, exceeds 0.2, exceeds 0.25, exceeds 0.3, exceeds 0.35, exceeds 0.4, exceeds 0.45, or exceeds 0.5 for an enhanced in vivo delivery of siRNA.

[0135] Accordingly, conjugating the lipophilic moieties to the internal position(s) of the double-stranded RNAi agent provides optimal hydrophobicity for the enhanced in vivo delivery of siRNA.

[0136] The term “lipid nanoparticle” or “LNP” is a vesicle comprising a lipid layer encapsulating a pharmaceutically active molecule, such as a nucleic acid molecule, e.g., a RNAi agent or a plasmid from which a RNAi agent is transcribed. LNPs are described in, for example, U.S. Pat. Nos. 6,858,225, 6,815,432, 8,158,601, and 8,058,069, the entire contents of which are hereby incorporated herein by reference.

[0137] As used herein, the term “modulate the expression of,” refers to an at least partial “inhibition” or partial “activation” of a gene (e.g., CA2 gene) expression in a cell treated with an iRNA composition as described herein compared to the expression of the corresponding gene in a control cell. A control cell includes an untreated cell, or a cell treated with a non-targeting control iRNA.

[0138] The skilled artisan will recognize that the term “RNA molecule” or “ribonucleic acid molecule” encompasses not only RNA molecules as expressed or found in nature, but also analogs and derivatives of RNA comprising one or more ribonucleotide/ribonucleoside analogs or derivatives as described herein or as known in the art. Strictly speaking, a “ribonucleoside” includes a nucleoside base and a ribose sugar, and a “ribonucleotide” is a ribonucleoside with one, two or three phosphate moieties or analogs thereof (e.g., phosphorothioate). However, the terms “ribonucleoside” and “ribonucleotide” can be considered to be equivalent as used herein. The RNA can be modified in the nucleobase structure, in the ribose structure, or in the ribose-phosphate backbone structure, e.g., as described herein below. However, the molecules comprising ribonucleoside analogs or derivatives must retain the ability to form a duplex. As non-limiting examples, an RNA molecule can also include at least one modified ribonucleoside including but not limited to a 2′-O-methyl modified nucleoside, a nucleoside comprising a 5′ phosphorothioate group, a terminal nucleoside linked to a cholesteryl derivative or dodecanoic acid bisdecylamide group, a locked nucleoside, an abasic nucleoside, an acyclic nucleoside, a glycol nucleotide, a 2′-deoxy-2′-fluoro modified nucleoside, a 2′-amino-modified nucleoside, 2′-alkyl-modified nucleoside, morpholino nucleoside, a phosphoramidate or a non-natural base comprising nucleoside, or any combination thereof. Alternatively, or in combination, an RNA molecule can comprise at least two modified ribonucleosides, at least 3, at least 4, at least 5, at least 6, at least 7, at least 8, at least 9, at least 10, at least 15, at least 20 or more, up to the entire length of the dsRNA molecule. The modifications need not be the same for each of such a plurality of modified ribonucleosides in an RNA molecule. In some embodiments, modified RNAs contemplated for use in methods and compositions described herein are peptide nucleic acids (PNAs) that have the ability to form the required duplex structure and that permit or mediate the specific degradation of a target RNA, e.g., via a RISC pathway. For clarity, it is understood that the term “iRNA” does not encompass a naturally occurring double stranded DNA molecule or a 100% deoxynucleoside-containing DNA molecule.

[0139] In some aspects, a modified ribonucleoside includes a deoxyribonucleoside. In such an instance, an iRNA agent can comprise one or more deoxynucleosides, including, for example, a deoxynucleoside overhang(s), or one or more deoxynucleosides within the double stranded portion of a dsRNA. In certain embodiments, the RNA molecule comprises a percentage of deoxyribonucleosides of at least 5, 10, 15, 20, 25, 30, 35, 40, 45, 50, 55, 60, 65, 70, 75, 80, 85, 90, 95% or higher (but not 100%) deoxyribonucleosides, e.g., in one or both strands.

[0140] As used herein, the term “nucleotide overhang” refers to at least one unpaired nucleotide that protrudes from the duplex structure of an iRNA, e.g., a dsRNA. For example, when a 3′-end of one strand of a dsRNA extends beyond the 5′-end of the other strand, or vice versa, there is a nucleotide overhang. A dsRNA can comprise an overhang of at least one nucleotide; alternatively, the overhang can comprise at least two nucleotides, at least three nucleotides, at least four nucleotides, or at least five nucleotides or more. A nucleotide overhang can comprise or consist of a nucleotide/nucleoside analog, including a deoxynucleotide/nucleoside. The overhang(s) may be on the sense strand, the antisense strand or any combination thereof. Furthermore, the nucleotide(s) of an overhang can be present on the 5′ end, 3′ end or both ends of either an antisense or sense strand of a dsRNA.

[0141] In some embodiments, the antisense strand of a dsRNA has a 1-10 nucleotide overhang at the 3′ end and/or the 5′ end. In some embodiments, the sense strand of a dsRNA has a 1-10 nucleotide overhang at the 3′ end and/or the 5′ end. In some embodiments, one or more of the nucleotides in the overhang is replaced with a nucleoside thiophosphate.

[0142] As used herein, a “pharmaceutical composition” comprises a pharmacologically effective amount of a therapeutic agent (e.g., an iRNA) and a pharmaceutically acceptable carrier. As used herein, “pharmacologically effective amount,” “therapeutically effective amount” or simply “effective amount” refers to that amount of an agent (e.g., iRNA) effective to produce the intended pharmacological, therapeutic or preventive result. For example, in a method of treating a disorder related to CA2 expression (e.g., glaucoma or conditions associated with glaucoma), an effective amount includes an amount effective to reduce one or more symptoms associated with the disorder, e.g., an amount effective to (a) inhibit or reduce intraocular pressure; (b) inhibit or reduce the expression or activity of CA2; (c) decrease the amount of aqueous humor; (d) inhibit or reduce optic nerve damage; or (e) inhibit or reduce retinal ganglion cell death or an amount effective to reduce the risk of developing conditions associated with the disorder. For example, if a given clinical treatment is considered effective when there is at least a 10% reduction in a measurable parameter associated with a disease or disorder, a therapeutically effective amount of a drug for the treatment of that disease or disorder is the amount necessary to obtain at least a 10% reduction in that parameter. For example, a therapeutically effective amount of an iRNA targeting CA2 can reduce a level of CA2 mRNA or a level of CA2 protein by any measurable amount, e.g., by at least 10%, 15%, 20%, 25%, 30%, 35%, 40%, 45%, 50%, 55%, 60%, 65%, 70%, 75%, 80%, 85%, 90%, or 95%.

[0143] The term “pharmaceutically acceptable carrier” refers to a carrier for administration of a therapeutic agent. Such carriers include, but are not limited to, saline, buffered saline, dextrose, water, glycerol, ethanol, and combinations thereof. The term specifically excludes cell culture medium. For drugs administered orally, pharmaceutically acceptable carriers include, but are not limited to pharmaceutically acceptable excipients such as inert diluents, disintegrating agents, binding agents, lubricating agents, sweetening agents, flavoring agents, coloring agents and preservatives. Suitable inert diluents include sodium and calcium carbonate, sodium and calcium phosphate, and lactose, while corn starch and alginic acid are suitable disintegrating agents. Binding agents may include starch and gelatin, while the lubricating agent, if present, will generally be magnesium stearate, stearic acid or talc. If desired, the tablets may be coated with a material such as glyceryl monostearate or glyceryl distearate, to delay absorption in the gastrointestinal tract. Agents included in drug formulations are described further herein below.

[0144] As used herein, the term “SNALP” refers to a stable nucleic acid-lipid particle. A SNALP represents a vesicle of lipids coating a reduced aqueous interior comprising a nucleic acid such as an iRNA or a plasmid from which an iRNA is transcribed. SNALPs are described, e.g., in U.S. Patent Application Publication Nos. 2006/0240093, 2007/0135372, and in International Application No. WO 2009/082817. These applications are incorporated herein by reference in their entirety. In some embodiments, the SNALP is a SPLP. As used herein, the term “SPLP” refers to a nucleic acid-lipid particle comprising plasmid DNA encapsulated within a lipid vesicle.

[0145] As used herein, the term “strand comprising a sequence” refers to an oligonucleotide comprising a chain of nucleotides that is described by the sequence referred to using the standard nucleotide nomenclature.

[0146] As used herein, a “subject” to be treated according to the methods described herein, includes a human or non-human animal, e.g., a mammal. The mammal may be, for example, a rodent (e.g., a rat or mouse) or a primate (e.g., a monkey). In some embodiments, the subject is a human.

[0147] A “subject in need thereof” includes a subject having, suspected of having, or at risk of developing a disorder related to CA2 expression, e.g., overexpression (e.g., glaucoma or conditions associated with glaucoma). In some embodiments, the subject has, or is suspected of having, a disorder related to CA2 expression or overexpression. In some embodiments, the subject is at risk of developing a disorder related to CA2 expression or overexpression.

[0148] As used herein, “target sequence” refers to a contiguous portion of the nucleotide sequence of an mRNA molecule formed during the transcription of a gene, e.g., CA2, including mRNA that is a product of RNA processing of a primary transcription product. The target portion of the sequence will be at least long enough to serve as a substrate for iRNA-directed cleavage at or near that portion. For example, the target sequence will generally be from 9-36 nucleotides in length, e.g., 15-30 nucleotides in length, including all sub-ranges therebetween. As non-limiting examples, the target sequence can be from 15-30 nucleotides, 15-26 nucleotides, 15-23 nucleotides, 15-22 nucleotides, 15-21 nucleotides, 15-20 nucleotides, 15-19 nucleotides, 15-18 nucleotides, 15-17 nucleotides, 18-30 nucleotides, 18-26 nucleotides, 18-23 nucleotides, 18-22 nucleotides, 18-21 nucleotides, 18-20 nucleotides, 19-30 nucleotides, 19-26 nucleotides, 19-23 nucleotides, 19-22 nucleotides, 19-21 nucleotides, 19-20 nucleotides, 20-30 nucleotides, 20-26 nucleotides, 20-25 nucleotides, 20-24 nucleotides, 20-23 nucleotides, 20-22 nucleotides, 20-21 nucleotides, 21-30 nucleotides, 21-26 nucleotides, 21-25 nucleotides, 21-24 nucleotides, 21-23 nucleotides, or 21-22 nucleotides.

[0149] As used herein, the phrases “therapeutically effective amount” and “prophylactically effective amount” and the like refer to an amount that provides a therapeutic benefit in the treatment, prevention, or management of any disorder or pathological process related to CA2 expression (e.g., glaucoma or conditions associated with glaucoma). The specific amount that is therapeutically effective may vary depending on factors known in the art, such as, for example, the type of disorder or pathological process, the patient's history and age, the stage of the disorder or pathological process, and the administration of other therapies.

[0150] In the context of the present disclosure, the terms “treat,” “treatment,” and the like mean to prevent, delay, relieve or alleviate at least one symptom associated with a disorder related to CA2 expression, or to slow or reverse the progression or anticipated progression of such a disorder. For example, the methods featured herein, when employed to treat glaucoma or conditions associated with glaucoma, may serve to reduce or prevent one or more symptoms of glaucoma or conditions associated with glaucoma, as described herein, or to reduce the risk or severity of associated conditions. Thus, unless the context clearly indicates otherwise, the terms “treat,” “treatment,” and the like are intended to encompass prophylaxis, e.g., prevention of disorders and/or symptoms of disorders related to CA2 expression. Treatment can also mean prolonging survival as compared to expected survival in the absence of treatment.

[0151] By “lower” in the context of a disease marker or symptom is meant any decrease, e.g., a statistically or clinically significant decrease in such level. The decrease can be, for example, at least 10%, at least 20%, at least 30%, at least 40%, at least 40%, at least 50%, at least 60%, at least 70%, at least 80%, or at least 90%. The decrease can be down to a level accepted as within the range of normal for an individual without such disorder.

[0152] As used herein, “CA2” refers to “carbonic anhydrase 2” the corresponding mRNA (“CA2 mRNA”), or the corresponding protein (“CA2 protein”). The sequence of a human CA2 mRNA transcript can be found at SEQ ID NO: 1.

[0153] The term “substituted” refers to the replacement of one or more hydrogen radicals in a given structure with the radical of a specified substituent including, but not limited to: alkyl, alkenyl, alkynyl, aryl, heterocyclyl, halo, thiol, alkylthio, arylthio, alkylthioalkyl, arylthioalkyl, alkylsulfonyl, alkylsulfonylalkyl, arylsulfonylalkyl, alkoxy, aryloxy, aralkoxy, aminocarbonyl, alkylaminocarbonyl, arylaminocarbonyl, alkoxycarbonyl, aryloxycarbonyl, haloalkyl, amino, trifluoromethyl, cyano, nitro, alkylamino, arylamino, alkylaminoalkyl, arylaminoalkyl, aminoalkylamino, hydroxy, alkoxyalkyl, carboxyalkyl, alkoxycarbonylalkyl, aminocarbonylalkyl, acyl, aralkoxycarbonyl, carboxylic acid, sulfonic acid, sulfonyl, phosphonic acid, aryl, heteroaryl, heterocyclic, and aliphatic. It is understood that the substituent can be further substituted.

[0154] The term “alkyl” refers to saturated and unsaturated non-aromatic hydrocarbon chains that may be a straight chain or branched chain, containing the indicated number of carbon atoms (these include without limitation propyl, allyl, or propargyl), which may be optionally inserted with N, O, or S. For example, “(C1-C6) alkyl” means a radical having from 1 6 carbon atoms in a linear or branched arrangement. “(C1-C6) alkyl” includes, for example, methyl, ethyl, propyl, iso-propyl, n-butyl, tert-butyl, pentyl and hexyl. In certain embodiments, a lipophilic moiety of the instant disclosure can include a C6-C18 alkyl hydrocarbon chain.

[0155] The term “alkylene” refers to an optionally substituted saturated aliphatic branched or straight chain divalent hydrocarbon radical having the specified number of carbon atoms. For example, “(C1-C6) alkylene” means a divalent saturated aliphatic radical having from 1-6 carbon atoms in a linear arrangement, e.g., [(CH₂)ₙ], where n is an integer from 1 to 6. “(C1-C6) alkylene” includes methylene, ethylene, propylene, butylene, pentylene and hexylene. Alternatively, “(C1-C6) alkylene” means a divalent saturated radical having from 1-6 carbon atoms in a branched arrangement, for example: [(CH₂CH₂CH₂CH₂CH(CH₃)], [(CH₂CH₂CH₂CH₂C(CH₃)₂], [(CH₂C(CH₃)₂CH(CH₃))], and the like. The term “alkylenedioxo” refers to a divalent species of the structure —O—R—O—, in which R represents an alkylene.

[0156] The term “mercapto” refers to an —SH radical. The term “thioalkoxy” refers to an —S— alkyl radical.

[0157] The term “halo” refers to any radical of fluorine, chlorine, bromine or iodine. “Halogen” and “halo” are used interchangeably herein.

[0158] As used herein, the term “cycloalkyl” means a saturated or unsaturated nonaromatic hydrocarbon ring group having from 3 to 14 carbon atoms, unless otherwise specified. For example, “(C3-C10) cycloalkyl” means a hydrocarbon radical of a (3-10)-membered saturated aliphatic cyclic hydrocarbon ring. Examples of cycloalkyl groups include, but are not limited to, cyclopropyl, methyl-cyclopropyl, 2,2-dimethyl-cyclobutyl, 2-ethyl-cyclopentyl, cyclohexyl, etc. Cycloalkyls may include multiple spiro- or fused rings. Cycloalkyl groups are optionally mono-, di-, tri-, tetra-, or penta-substituted on any position as permitted by normal valency.

[0159] As used herein, the term “alkenyl” refers to a non-aromatic hydrocarbon radical, straight or branched, containing at least one carbon-carbon double bond, and having from 2 to 10 carbon atoms unless otherwise specified. Up to five carbon-carbon double bonds may be present in such groups. For example, “C2-C6” alkenyl is defined as an alkenyl radical having from 2 to 6 carbon atoms. Examples of alkenyl groups include, but are not limited to, ethenyl, propenyl, butenyl, and cyclohexenyl. The straight, branched, or cyclic portion of the alkenyl group may contain double bonds and is optionally mono-, di-, tri-, tetra-, or penta-substituted on any position as permitted by normal valency. The term “cycloalkenyl” means a monocyclic hydrocarbon group having the specified number of carbon atoms and at least one carbon-carbon double bond.

[0160] As used herein, the term “alkynyl” refers to a hydrocarbon radical, straight or branched, containing from 2 to 10 carbon atoms, unless otherwise specified, and containing at least one carbon-carbon triple bond. Up to 5 carbon-carbon triple bonds may be present. Thus, “C2-C6 alkynyl” means an alkynyl radical having from 2 to 6 carbon atoms. Examples of alkynyl groups include, but are not limited to, ethynyl, 2-propynyl, and 2-butynyl. The straight or branched portion of the alkynyl group may contain triple bonds as permitted by normal valency, and may be optionally mono-, di-, tri-, tetra-, or penta-substituted on any position as permitted by normal valency.

[0161] As used herein, “alkoxyl” or “alkoxy” refers to an alkyl group as defined above with the indicated number of carbon atoms attached through an oxygen bridge. For example, “(C1-C3)alkoxy” includes methoxy, ethoxy and propoxy. For example, “(C1-C6)alkoxy”, is intended to include C1, C2, C3, C4, C5, and C6 alkoxy groups. For example, “(C1-C8)alkoxy”, is intended to include C1, C2, C3, C4, C5, C6, C7, and C8 alkoxy groups. Examples of alkoxy include, but are not limited to, methoxy, ethoxy, n-propoxy, i-propoxy, n-butoxy, s-butoxy, t-butoxy, n-pentoxy, s-pentoxy, n-heptoxy, and n-octoxy. “Alkylthio” means an alkyl radical attached through a sulfur linking atom. The terms “alkylamino” or “aminoalkyl”, means an alkyl radical attached through an NH linkage. “Dialkylamino” means two alkyl radical attached through a nitrogen linking atom. The amino groups may be unsubstituted, monosubstituted, or di-substituted. In some embodiments, the two alkyl radicals are the same (e.g., N,N-dimethylamino). In some embodiments, the two alkyl radicals are different (e.g., N-ethyl-N-methylamino).

[0162] As used herein, “aryl” or “aromatic” means any stable monocyclic or polycyclic carbon ring of up to 7 atoms in each ring, wherein at least one ring is aromatic. Examples of aryl groups include, but are not limited to, phenyl, naphthyl, anthracenyl, tetrahydronaphthyl, indanyl, and biphenyl. In cases where the aryl substituent is bicyclic and one ring is non-aromatic, it is understood that attachment is via the aromatic ring. Aryl groups are optionally mono-, di-, tri-, tetra-, or penta-substituted on any position as permitted by normal valency. The term “arylalkyl” or the term “aralkyl” refers to alkyl substituted with an aryl. The term “arylalkoxy” refers to an alkoxy substituted with aryl.

[0163] “Hetero” refers to the replacement of at least one carbon atom in a ring system with at least one heteroatom selected from N, S and O. “Hetero” also refers to the replacement of at least one carbon atom in an acyclic system. A hetero ring system or a hetero acyclic system may have, for example, 1, 2 or 3 carbon atoms replaced by a heteroatom.

[0164] As used herein, the term “heteroaryl” represents a stable monocyclic or polycyclic ring of up to 7 atoms in each ring, wherein at least one ring is aromatic and contains from 1 to 4 heteroatoms selected from the group consisting of O, N and S. Examples of heteroaryl groups include, but are not limited to, acridinyl, carbazolyl, cinnolinyl, quinoxalinyl, pyrrazolyl, indolyl, benzotriazolyl, furanyl, thienyl, benzothienyl, benzofuranyl, benzimidazolonyl, benzoxazolonyl, quinolinyl, isoquinolinyl, dihydroisoindolonyl, imidazopyridinyl, isoindolonyl, indazolyl, oxazolyl, oxadiazolyl, isoxazolyl, indolyl, pyrazinyl, pyridazinyl, pyridinyl, pyrimidinyl, pyrrolyl, tetrahydroquinoline. “Heteroaryl” is also understood to include the N-oxide derivative of any nitrogen-containing heteroaryl. In cases where the heteroaryl substituent is bicyclic and one ring is non-aromatic or contains no heteroatoms, it is understood that attachment is via the aromatic ring or via the heteroatom containing ring. Heteroaryl groups are optionally mono-, di-, tri-, tetra-, or penta-substituted on any position as permitted by normal valency.

[0165] As used herein, the term “heterocycle,” “heterocyclic,” or “heterocyclyl” means a 3- to 14-membered aromatic or nonaromatic heterocycle containing from 1 to 4 heteroatoms selected from the group consisting of O, N and S, including polycyclic groups. As used herein, the term “heterocyclic” is also considered to be synonymous with the terms “heterocycle” and “heterocyclyl” and is understood as also having the same definitions set forth herein. “Heterocyclyl” includes the above mentioned heteroaryls, as well as dihydro and tetrahydro analogs thereof. Examples of heterocyclyl groups include, but are not limited to, azetidinyl, benzoimidazolyl, benzofuranyl, benzofurazanyl, benzopyrazolyl, benzotriazolyl, benzothiophenyl, benzoxazolyl, carbazolyl, carbolinyl, cinnolinyl, furanyl, imidazolyl, indolinyl, indolyl, indolazinyl, indazolyl, isobenzofuranyl, isoindolyl, isoquinolyl, isothiazolyl, isoxazolyl, naphthpyridinyl, oxadiazolyl, oxooxazolidinyl, oxazolyl, oxazoline, oxopiperazinyl, oxopyrrolidinyl, oxomorpholinyl, isoxazoline, oxetanyl, pyranyl, pyrazinyl, pyrazolyl, pyridazinyl, pyridopyridinyl, pyridazinyl, pyridyl, pyridinonyl, pyrimidyl, pyrimidinonyl, pyrrolyl, quinazolinyl, quinolyl, quinoxalinyl, tetrahydropyranyl, tetrahydrofuranyl, tetrahydrothiopyranyl, tetrahydroisoquinolinyl, tetrazolyl, tetrazolopyridyl, thiadiazolyl, thiazolyl, thienyl, triazolyl, 1,4-dioxanyl, hexahydroazepinyl, piperazinyl, piperidinyl, pyridin-2-onyl, pyrrolidinyl, morpholinyl, thiomorpholinyl, dihydrobenzoimidazolyl, dihydrobenzofuranyl, dihydrobenzothiophenyl, dihydrobenzoxazolyl, dihydrofuranyl, dihydroimidazolyl, dihydroindolyl, dihydroisooxazolyl, dihydroisothiazolyl, dihydrooxadiazolyl, dihydrooxazolyl, dihydropyrazinyl, dihydropyrazolyl, dihydropyridinyl, dihydropyrimidinyl, dihydropyrrolyl, dihydroquinolinyl, dihydrotetrazolyl, dihydrothiadiazolyl, dihydrothiazolyl, dihydrothienyl, dihydrotriazolyl, dihydroazetidinyl, dioxidothiomorpholinyl, methylenedioxybenzoyl, tetrahydrofuranyl, and tetrahydrothienyl, and N-oxides thereof. Attachment of a heterocyclyl substituent can occur via a carbon atom or via a heteroatom. Heterocyclyl groups are optionally mono-, di-, tri-, tetra-, or penta-substituted on any position as permitted by normal valency.

[0166] “Heterocycloalkyl” refers to a cycloalkyl residue in which one to four of the carbons is replaced by a heteroatom such as oxygen, nitrogen or sulfur. Examples of heterocycles whose radicals are heterocyclyl groups include tetrahydropyran, morpholine, pyrrolidine, piperidine, thiazolidine, oxazole, oxazoline, isoxazole, dioxane, tetrahydrofuran and the like.

[0167] The term “heteroaryl” refers to an aromatic 5-8 membered monocyclic, 8-12 membered bicyclic, or 11-14 membered tricyclic ring system having 1-3 heteroatoms if monocyclic, 1-6 heteroatoms if bicyclic, or 1-9 heteroatoms if tricyclic, said heteroatoms selected from O, N, or S (e.g., carbon atoms and 1-3, 1-6, or 1-9 heteroatoms of N, O, or S if monocyclic, bicyclic, or tricyclic, respectively), wherein 0, 1, 2, 3, or 4 atoms of each ring may be substituted by a substituent. Examples of heteroaryl groups include pyridyl, furyl or furanyl, imidazolyl, benzimidazolyl, pyrimidinyl, thiophenyl or thienyl, quinolinyl, indolyl, thiazolyl, and the like. The term “heteroarylalkyl” or the term “heteroaralkyl” refers to an alkyl substituted with a heteroaryl. The term “heteroarylalkoxy” refers to an alkoxy substituted with heteroaryl.

[0168] The term “cycloalkyl” as employed herein includes saturated and partially unsaturated cyclic hydrocarbon groups having 3 to 12 carbons, for example, 3 to 8 carbons, and, for example, 3 to 6 carbons, wherein the cycloalkyl group additionally may be optionally substituted. Cycloalkyl groups include, without limitation, cyclopropyl, cyclobutyl, cyclopentyl, cyclopentenyl, cyclohexyl, cyclohexenyl, cycloheptyl, and cyclooctyl.

[0169] The term “acyl” refers to an alkylcarbonyl, cycloalkylcarbonyl, arylcarbonyl, heterocyclylcarbonyl, or heteroarylcarbonyl substituent, any of which may be further substituted by substituents.

[0170] As used herein, “keto” refers to any alkyl, alkenyl, alkynyl, cycloalkyl, cycloalkenyl, heterocyclyl, heteroaryl, or aryl group as defined herein attached through a carbonyl bridge.

[0171] Examples of keto groups include, but are not limited to, alkanoyl (e.g., acetyl, propionyl, butanoyl, pentanoyl, hexanoyl), alkenoyl (e.g., acryloyl) alkynoyl (e.g., ethynoyl, propynoyl, butynoyl, pentynoyl, hexynoyl), aryloyl (e.g., benzoyl), heteroaryloyl (e.g., pyrroloyl, imidazoloyl, quinolinoyl, pyridinoyl).

[0172] As used herein, “alkoxycarbonyl” refers to any alkoxy group as defined above attached through a carbonyl bridge (i.e., —C(O)O-alkyl). Examples of alkoxycarbonyl groups include, but are not limited to, methoxycarbonyl, ethoxycarbonyl, iso-propoxycarbonyl, n-propoxycarbonyl, t-butoxycarbonyl, benzyloxycarbonyl or n-pentoxycarbonyl.

[0173] As used herein, “aryloxycarbonyl” refers to any aryl group as defined herein attached through an oxycarbonyl bridge (i.e., —C(O)O-aryl). Examples of aryloxycarbonyl groups include, but are not limited to, phenoxycarbonyl and naphthyloxycarbonyl.

[0174] As used herein, “heteroaryloxycarbonyl” refers to any heteroaryl group as defined herein attached through an oxycarbonyl bridge (i.e., —C(O)O-heteroaryl). Examples of heteroaryloxycarbonyl groups include, but are not limited to, 2-pyridyloxycarbonyl, 2-oxazolyloxycarbonyl, 4-thiazolyloxycarbonyl, or pyrimidinyloxycarbonyl.

[0175] The term “oxo” refers to an oxygen atom, which forms a carbonyl when attached to carbon, an N-oxide when attached to nitrogen, and a sulfoxide or sulfone when attached to sulfur.

[0176] The person of ordinary skill in the art would readily understand and appreciate that the compounds and compositions disclosed herein may have certain atoms (e.g., N, O, or S atoms) in a protonated or deprotonated state, depending upon the environment in which the compound or composition is placed. Accordingly, as used herein, the structures disclosed herein envisage that certain functional groups, such as, for example, OH, SH, or NH, may be protonated or deprotonated. The disclosure herein is intended to cover the disclosed compounds and compositions regardless of their state of protonation based on the pH of the environment, as would be readily understood by the person of ordinary skill in the art.

### II. iRNA Agents

[0177] Described herein are iRNA agents that modulate (e.g., inhibit) the expression of CA2.

[0178] In some embodiments, the iRNA agent activates the expression of CA2 in a cell or mammal.

[0179] In some embodiments, the iRNA agent includes double-stranded ribonucleic acid (dsRNA) molecules for inhibiting the expression of CA2 in a cell or in a subject (e.g., in a mammal, e.g., in a human), where the dsRNA includes an antisense strand having a region of complementarity which is complementary to at least a part of an mRNA formed in the expression of CA2, and where the region of complementarity is 30 nucleotides or less in length, generally 19-24 nucleotides in length, and where the dsRNA, upon contact with a cell expressing CA2, inhibits the expression of CA2, e.g., by at least 10%, 20%, 30%, 40%, or 50% as compared to a similar cell not contacted with the RNAi agent or an RNAi agent not complimentary to the CA2 gene.

[0180] The modulation (e.g., inhibition) of expression of CA2 can be assayed by, for example, a PCR or branched DNA (bDNA)-based method, or by a protein-based method, such as by Western blot. Expression of CA2 in cell culture, such as in COS cells, ARPE-19 cells, hTERT RPE-1 cells, RPE-J cells, HeLa cells, primary hepatocytes, HepG2 cells, primary cultured cells or in a biological sample from a subject can be assayed by measuring CA2 mRNA levels, such as by bDNA or TaqMan assay, or by measuring protein levels, such as by immunofluorescence analysis, using, for example, Western Blotting or flow cytometric techniques.

[0181] A dsRNA typically includes two RNA strands that are sufficiently complementary to hybridize to form a duplex structure under conditions in which the dsRNA will be used. One strand of a dsRNA (the antisense strand) typically includes a region of complementarity that is substantially complementary, or fully complementary, to a target sequence, derived from the sequence of an mRNA formed during the expression of CA2. The other strand (the sense strand) typically includes a region that is complementary to the antisense strand, such that the two strands hybridize and form a duplex structure when combined under suitable conditions. Generally, the duplex structure is between 15 and 30 inclusive, more generally between 18 and 25 inclusive, yet more generally between 19 and 24 inclusive, and most generally between 19 and 21 base pairs in length, inclusive. Similarly, the region of complementarity to the target sequence is between 15 and 30 inclusive, more generally between 18 and 25 inclusive, yet more generally between 19 and 24 inclusive, and most generally between 19 and 21 nucleotides in length, inclusive.

[0182] In some embodiments, the dsRNA is between 15 and 20 nucleotides in length, inclusive, and in other embodiments, the dsRNA is between 25 and 30 nucleotides in length, inclusive. As the ordinarily skilled person will recognize, the targeted region of an RNA targeted for cleavage will most often be part of a larger RNA molecule, often an mRNA molecule. Where relevant, a “part” of an mRNA target is a contiguous sequence of an mRNA target of sufficient length to be a substrate for RNAi-directed cleavage (i.e., cleavage through a RISC pathway). dsRNAs having duplexes as short as 9 base pairs can, under some circumstances, mediate RNAi-directed RNA cleavage. Most often a target will be at least 15 nucleotides in length, e.g., 15-30 nucleotides in length.

[0183] One of skill in the art will also recognize that the duplex region is a primary functional portion of a dsRNA, e.g., a duplex region of 9 to 36, e.g., 15-30 base pairs. Thus, in some embodiments, to the extent that it becomes processed to a functional duplex of e.g., 15-30 base pairs that targets a desired RNA for cleavage, an RNA molecule or complex of RNA molecules having a duplex region greater than 30 base pairs is a dsRNA. Thus, an ordinarily skilled artisan will recognize that in some embodiments, then, an miRNA is a dsRNA. In some embodiments, a dsRNA is not a naturally occurring miRNA. In some embodiments, an iRNA agent useful to target CA2 expression is not generated in the target cell by cleavage of a larger dsRNA.

[0184] A dsRNA as described herein may further include one or more single-stranded nucleotide overhangs. The dsRNA can be synthesized by standard methods known in the art as further discussed below, e.g., by use of an automated DNA synthesizer, such as are commercially available from, for example, Biosearch, Applied Biosystems, Inc.

[0185] In some embodiments, CA2 is a human CA2.

[0186] In specific embodiments, the dsRNA comprises a sense strand that comprises or consists of a sense sequence selected from the sense sequences provided in Tables 3-10 and an antisense strand that comprises or consists of an antisense sequence selected from the antisense sequences provided in Tables 3-10.

[0187] In some aspects, a dsRNA will include at least sense and antisense nucleotide sequences, whereby the sense strand is selected from the sequences provided in Tables 3-10 and the corresponding antisense strand is selected from the sequences provided in Tables 3-10.

[0188] In these aspects, one of the two sequences is complementary to the other of the two sequences, with one of the sequences being substantially complementary to a sequence of an mRNA generated by the expression of CA2. As such, a dsRNA will include two oligonucleotides, where one oligonucleotide is described as the sense strand, and the second oligonucleotide is described as the corresponding antisense strand. As described elsewhere herein and as known in the art, the complementary sequences of a dsRNA can also be contained as self-complementary regions of a single nucleic acid molecule, as opposed to being on separate oligonucleotides.

[0189] The skilled person is well aware that dsRNAs having a duplex structure of between 20 and 23, but specifically 21, base pairs have been hailed as particularly effective in inducing RNA interference (Elbashir et al., EMBO 2001, 20:6877-6888). However, others have found that shorter or longer RNA duplex structures can be effective as well.

[0190] In the embodiments described above, by virtue of the nature of the oligonucleotide sequences provided in Tables 3-10, dsRNAs described herein can include at least one strand of a length of minimally 19 nucleotides. It can be reasonably expected that shorter duplexes having one of the sequences of Tables 3-10 minus only a few nucleotides on one or both ends will be similarly effective as compared to the dsRNAs described above.

[0191] In some embodiments, the dsRNA has a partial sequence of at least 15, 16, 17, 18, 19, 20, or more contiguous nucleotides from one of the sequences of Tables 3-10.

[0192] In some embodiments, the dsRNA has an antisense sequence that comprises at least 15, 16, 17, 18, or 19 contiguous nucleotides of an antisense sequence provided in Tables 3-10 and a sense sequence that comprises at least 15, 16, 17, 18, or 19 contiguous nucleotides of a corresponding sense sequence provided in Tables 3-10.

[0193] In some embodiments, the dsRNA comprises an antisense sequence that comprises at least 15, 16, 17, 18, 19, 20, 21, 22, or 23 contiguous nucleotides of an antisense sequence provided in Tables 3-10 and a sense sequence that comprises at least 15, 16, 17, 18, 19, 20, or 21 contiguous nucleotides of a corresponding sense sequence provided in Tables 3-10.

[0194] In some such embodiments, the dsRNA, although it comprises only a portion of the sequences provided in Tables 3-10 is equally effective in inhibiting a level of CA2 expression as is a dsRNA that comprises the full-length sequences provided in Tables 3-10. In some embodiments, the dsRNA differs in its inhibition of a level of expression of CA2 by not more than 5, 10, 15, 20, 25, 30, 35, 40, 45, or 50% inhibition compared with a dsRNA comprising the full sequence disclosed herein.

[0195] The iRNAs of Tables 3-10 were designed based on human CA2 sequence. Without wishing to be bound by theory, CA2 sequence is conserved sufficiently between species such that certain iRNAs designed based on a human sequence have activity against CA2 from primates, such as cynomolgus monkey, and other species, including, for example, mouse, rat, and rabbit.

[0196] Consequently, in some embodiments, an iRNA of Tables 3-10 decreases CA2 protein or CA2 mRNA levels in a cell. In some embodiments, the cell is a rodent cell (e.g., a rat cell), or a primate cell (e.g., a cynomolgus monkey cell or a human cell). In some embodiments, CA2 protein or CA2 mRNA levels are reduced by at least 30%, 40%, 50%, 60%, 70%, 80%, 90%/c, or 95%. In some embodiments, the iRNA of Tables 3-10 that inhibits CA2 in a human cell has less than 5, 4, 3, 2, or 1 mismatches to the corresponding portion of human CA2. In some embodiments, the iRNA of Tables 3-10 that inhibits CA2 in a human cell has no mismatches to the corresponding portion of human CA2.

[0197] iRNAs designed based on rodent sequences can have utility, e.g., for inhibiting CA2 in human cells, e.g., for therapeutic purposes, or for inhibiting CA2 in rodent cells, e.g., for research characterizing CA2 in a rodent model.

[0198] In some embodiments, an iRNA described herein comprises an antisense strand comprising at least 15 contiguous nucleotides, with 0, 1, 2, or 3 mismatches, of a portion of nucleotide sequence of SEQ ID NO: 2. In some embodiments, an iRNA described herein comprises a sense strand comprising at least 15 contiguous nucleotides, with 0, or 1, 2, or 3 mismatches, of the corresponding portion of the nucleotide sequence of SEQ ID NO: 1. A human CA2 mRNA may have the sequence of SEQ ID NO: 1 provided herein.

[0199] In some embodiments, an iRNA described herein includes at least 15 contiguous nucleotides from one of the sequences provided in Tables 3-10, and may optionally be coupled to additional nucleotide sequences taken from the region contiguous to the selected sequence in CA2.

[0200] While a target sequence is generally 15-30 nucleotides in length, there is wide variation in the suitability of particular sequences in this range for directing cleavage of any given target RNA. Various software packages and the guidelines set out herein provide guidance for the identification of optimal target sequences for any given gene target, but an empirical approach can also be taken in which a “window” or “mask” of a given size (as a non-limiting example, 21 nucleotides) is literally or figuratively (including, e.g., in silico) placed on the target RNA sequence to identify sequences in the size range that may serve as target sequences. By moving the sequence “window” progressively one nucleotide upstream or downstream of an initial target sequence location, the next potential target sequence can be identified, until the complete set of possible sequences is identified for any given target size selected. This process, coupled with systematic synthesis and testing of the identified sequences (using assays described herein or known in the art) to identify those sequences that perform optimally can identify those RNA sequences that, when targeted with an iRNA agent, mediate the best inhibition of target gene expression. Thus, it is contemplated that further optimization of inhibition efficiency can be achieved by progressively “walking the window” one nucleotide upstream or downstream of the given sequences to identify sequences with equal or better inhibition characteristics.

[0201] Further, it is contemplated that for any sequence identified, e.g., in Tables 3-10, further optimization can be achieved by systematically either adding or removing nucleotides to generate longer or shorter sequences and testing those and sequences generated by walking a window of the longer or shorter size up or down the target RNA from that point. Again, coupling this approach to generating new candidate targets with testing for effectiveness of iRNAs based on those target sequences in an inhibition assay as known in the art or as described herein can lead to further improvements in the efficiency of inhibition. Further still, such optimized sequences can be adjusted by, e.g., the introduction of modified nucleotides as described herein or as known in the art, addition or changes in overhang, or other modifications as known in the art and/or discussed herein to further optimize the molecule (e.g., increasing serum stability or circulating half-life, increasing thermal stability, enhancing transmembrane delivery, targeting to a particular location or cell type, increasing interaction with silencing pathway enzymes, increasing release from endosomes, etc.) as an expression inhibitor.

[0202] In some embodiments, the disclosure provides an iRNA of any of Tables 3-10 that is un-modified or un-conjugated. In some embodiments, an RNAi agent of the disclosure has a nucleotide sequence as provided in any of Tables 3-10, but lacks one or more ligand or moiety shown in the tables. A ligand or moiety (e.g., a lipophilic ligand or moiety) can be included in any of the positions provided in the instant application.

[0203] An iRNA as described herein can contain one or more mismatches to the target sequence. In some embodiments, an iRNA as described herein contains no more than 3 mismatches. In some embodiments, when the antisense strand of the iRNA contains mismatches to a target sequence, the area of mismatch is not located in the center of the region of complementarity. In some embodiments, when the antisense strand of the iRNA contains mismatches to the target sequence, the mismatch is restricted to be within the last 5 nucleotides from either the 5′ or 3′ end of the region of complementarity. For example, for a 23 nucleotide iRNA agent RNA strand which is complementary to a region of CA2, the RNA strand generally does not contain any mismatch within the central 13 nucleotides. The methods described herein, or methods known in the art can be used to determine whether an iRNA containing a mismatch to a target sequence is effective in inhibiting the expression of CA2. For example, Jackson et al. (Nat. Biotechnol. 2003; 21: 635-637) described an expression profile study where the expression of a small set of genes with sequence identity to the MAPK14 siRNA only at 12-18 nt of the sense strand, was down-regulated with similar kinetics to MAPK14. Similarly, Lin et al., (Nucleic Acids Res. 2005; 33(14): 4527-4535) using qPCR and reporter assays, showed that a 7 nt complementation between a siRNA and a target is sufficient to cause mRNA degradation of the target. Consideration of the efficacy of iRNAs with mismatches in inhibiting expression of CA2 is important, especially if the particular region of complementarity in a CA2 gene is known to have polymorphic sequence variation within the population.

[0204] An RNA target may have regions, or spans of the target RNA's nucleotide sequence, which are relatively more susceptible or amenable than other regions of the RNA target to mediating cleavage of the RNA target via RNA interference induced by the binding of an RNAi agent to that region. The increased susceptibility to RNA interference within such “hotspot regions” (or simply “hotspots”) means that iRNA agents targeting the region will likely have higher efficacy in inducing iRNA interference than iRNA agents which target other regions of the target RNA. For example, without being bound by theory, the accessibility of a target region of a target RNA may influence the efficacy of iRNA agents which target that region, with some hotspot regions having increased accessibility. Secondary structures, for instance, that form in the RNA target (e.g., within or proximate to hotspot regions) may affect the ability of the iRNA agent to bind the target region and induce RNA interference.

[0205] According to certain aspects of the invention, an iRNA agent may be designed to target a hotspot region of any of the target RNAs described herein, including any identified portions of a target RNA (e.g., a particular exon). As used herein, a hotspot region may refer to an approximately 19-200, 19-150, 19-100, 19-75, 19-50, 21-200, 21-150, 21-100, 21-75, 21-50, 50-200, 50-150, 50-100, 50-75, 75-200, 75-150, 75-100, 100-200, or 100-150 nucleotide region of a target RNA sequence for which targeting using RNAi agents provides an observably higher probability of efficacious silencing relative to targeting other regions of the same target RNA. According to certain aspects of the invention, a hotspot region may comprise a limited region of the target RNA, and in some cases, a substantially limited region of the target, including for example, less than half of the length of the target RNA, such as about 5%, 10%, 15%, 20%, 25%, or 30% of the lenth of the target RNA. Conversely, the other regions against which a hotspot is compared may cumulatively comprise at least a majority of the length of the target RNA. For example, the other regions may cumulatively comprise at least about 60%, or at least about 70%, or at least about 80%, or at least about 90%, or at least about 95% of the length of the target RNA.

[0206] Compared regions of the target RNA may be empirically evaluated for identification of hotspots using efficacy data obtained from in vitro or in vivo screening assays. For example, RNAi agents targeting various regions that span a target RNA may be compared for frequency of efficacious iRNA agents (e.g., the amount by which target gene expression is inhibited, such as measured by mRNA expression or protein expression) that bind each region. In general, a hotspot can be recognized by observing clustering of multiple efficacious RNAi agents that bind to a limited region of the RNA target. A hotspot may be sufficiently characterized as such by observing efficacy of iRNA agents which cumulatively span at least about 60% of the target region identified as a hotspot, such as about 70%, about 80%, about 90%, or about 95% or more of the length of the region, including both ends of the region (i.e. at least about 60%, 70%, 80%, 90%, or 95% or more of the nucleotides within the region, including the nucleotides at each end of the region, were targeted by an iRNA agent). According to some aspects of the invention, an iRNA agent which demonstrates at least about 50%, 55%, 60%, 65%, 70%, 75%, 80%, 85%, 90%, or 95% inhibition over the region (e.g., no more than about 50%, 45%, 40%, 35%, 30%, 25%, 20%, 15%, 10%, or 5% mRNA remaining) may be identified as efficacious.

[0207] Amenibility to targeting of RNA regions may also be assessed using quantitative comparison of inhibition measurements across different regions of a defined size (e.g, 25, 30, 40, 50, 60, 70, 80, 90, or 100, 110, 120, 130, 140, 150, 160, 170, 180, 190, or 200 nts). For example, an average level of inhibition may be determined for each region and the averages of each region may be compared. The average level of inhibition within a hotspot region may be substantially higher than the average of averages for all evaluated regions. According to some aspects, the average level of inhibition in a hotspot region may be at least about 10%, 20%, 30%, 40%, or 50% higher than the average of averages. According to some aspects, the average level of inhibition in a hotspot region may be at least about 1.0, 1.1, 1.2, 1.3, 1.4, 1.5 1.6, 1.7, 1.8. 1.9, or 2.0 standard deviations above the average of averages. The average level of inhibition may be higher by a statistically significant (e.g., p<0.05) amount. According to some aspects, each inhibition measurement within a hotspot region may be above a threshold amount (e.g., at or below a threshold amount of mRNA remaining). According to some aspects, each inhibition measurement within the region may be substantially higher than an average of all inhibition measurements across all the measured regions. For example, each inhibition measurement in a hotspot region may be at least about 10%, 20%, 30%, 40%, or 50% higher than the average of all inhibition measurements. According to some aspects, each inhibition measurement may be at least about 1.0, 1.1, 1.2, 1.3, 1.4, 1.5 1.6, 1.7, 1.8. 1.9, or 2.0 standard deviations above the average of all inhibition measurements. Each inhibition measurement may be higher by a statistically significant (e.g., p<0.05) amount than the average of all inhibition measurements. A standard for evaluating a hotspot may comprise various combinations of the above standards where compatible (e.g., an average level of inhibition of at least about a first amount and having no inhibition measurements below a threshold level of a second amount, lesser than the first amount).

[0208] It is therefore expressly contemplated that any iRNA agent, including the specific exemplary iRNA agents described herein, which targets a hotspot region of a target RNA, may be preferably selected for inducing RNA interference of the target mRNA as targeting such a hotspot region is likely to exhibit a robust inhibitory response relative to targeting a region which is not a hotspot region. RNAi agents targeting target sequences that substantially overlap (e.g., by at least about 70%, 75%, 80%, 85%, 90%, 95% of the target sequence length) or, preferably, that reside fully within the hotspot region may be considered to target the hotspot region. Hotspot regions of the RNA target(s) of the instant invention may include any region for which the data disclosed herein demonstrates higher frequency of targeting by efficacious RNAi agents, including by any of the standards described elsewhere herein, whether or not the range(s) of such hotspot region(s) are explicitly specified.

[0209] In various embodiments, a dsRNA agent of the present invention targets a hotspot region of an mRNA encoding CA2.

[0210] In some embodiments, at least one end of a dsRNA has a single-stranded nucleotide overhang of 1 to 4, generally 1 or 2 nucleotides. In some embodiments, dsRNAs having at least one nucleotide overhang have superior inhibitory properties relative to their blunt-ended counterparts. In some embodiments, the RNA of an iRNA (e.g., a dsRNA) is chemically modified to enhance stability or other beneficial characteristics. The nucleic acids featured in the disclosure may be synthesized and/or modified by methods well established in the art, such as those described in “Current protocols in nucleic acid chemistry,” Beaucage, S. L. et al. (Edrs.), John Wiley & Sons, Inc., New York, NY, USA, which is hereby incorporated herein by reference. Modifications include, for example, (a) end modifications, e.g., 5′ end modifications (phosphorylation, conjugation, inverted linkages, etc.) 3′ end modifications (conjugation, DNA nucleotides, inverted linkages, etc.), (b) base modifications, e.g., replacement with stabilizing bases, destabilizing bases, or bases that base pair with an expanded repertoire of partners, removal of bases (abasic nucleotides), or conjugated bases, (c) sugar modifications (e.g., at the 2′ position or 4′ position, or having an acyclic sugar) or replacement of the sugar, as well as (d) backbone modifications, including modification or replacement of the phosphodiester linkages. Specific examples of RNA compounds useful in this disclosure include, but are not limited to, RNAs containing modified backbones or no natural internucleoside linkages. RNAs having modified backbones include, among others, those that do not have a phosphorus atom in the backbone. For the purposes of this specification, and as sometimes referenced in the art, modified RNAs that do not have a phosphorus atom in their internucleoside backbone can also be considered to be oligonucleosides. In particular embodiments, the modified RNA will have a phosphorus atom in its internucleoside backbone.

[0211] Modified RNA backbones include, for example, phosphorothioates, chiral phosphorothioates, phosphorodithioates, phosphotriesters, aminoalkylphosphotriesters, methyl and other alkyl phosphonates including 3-alkylene phosphonates and chiral phosphonates, phosphinates, phosphoramidates including 3′-amino phosphoramidate and aminoalkylphosphoramidates, thionophosphoramidates, thionoalkylphosphonates, thionoalkylphosphotriesters, and boranophosphates having normal 3′-5′ linkages, 2′-5′ linked analogs of these, and those) having inverted polarity wherein the adjacent pairs of nucleoside units are linked 3′-5′ to 5′-3′ or 2′-5′ to 5′-2′. Various salts, mixed salts and free acid forms are also included.

[0212] Representative U.S. patents that teach the preparation of the above phosphorus-containing linkages include, but are not limited to, U.S. Pat. Nos. 3,687,808; 4,469,863; 4,476,301; 5,023,243; 5,177,195; 5,188,897; 5,264,423; 5,276,019; 5,278,302; 5,286,717; 5,321,131; 5,399,676; 5,405,939; 5,453,496; 5,455,233; 5,466,677; 5,476,925; 5,519,126; 5,536,821; 5,541,316; 5,550,111; 5,563,253; 5,571,799; 5,587,361; 5,625,050; 6,028,188; 6,124,445; 6,160,109; 6,169,170; 6,172,209; 6,239,265; 6,277,603; 6,326,199; 6,346,614; 6,444,423; 6,531,590; 6,534,639; 6,608,035; 6,683,167; 6,858,715; 6,867,294; 6,878,805; 7,015,315; 7,041,816; 7,273,933; 7,321,029; and U.S. Pat. RE39464, each of which is herein incorporated by reference.

[0213] Modified RNA backbones that do not include a phosphorus atom therein have backbones that are formed by short chain alkyl or cycloalkyl internucleoside linkages, mixed heteroatoms and alkyl or cycloalkyl internucleoside linkages, or one or more short chain heteroatomic or heterocyclic internucleoside linkages. These include those having morpholino linkages (formed in part from the sugar portion of a nucleoside); siloxane backbones; sulfide, sulfoxide and sulfone backbones; formacetyl and thioformacetyl backbones; methylene formacetyl and thioformacetyl backbones; alkene containing backbones; sulfamate backbones; methyleneimino and methylenehydrazino backbones; sulfonate and sulfonamide backbones; amide backbones; and others having mixed N, O, S and CH₂ component parts.

[0214] Representative U.S. patents that teach the preparation of the above oligonucleosides include, but are not limited to, U.S. Pat. Nos. 5,034,506; 5,166,315; 5,185,444; 5,214,134; 5,216,141; 5,235,033; 5,64,562; 5,264,564; 5,405,938; 5,434,257; 5,466,677; 5,470,967; 5,489,677; 5,541,307; 5,561,225; 5,596,086; 5,602,240; 5,608,046; 5,610,289; 5,618,704; 5,623,070; 5,663,312; 5,633,360; 5,677,437; and, 5,677,439, each of which is herein incorporated by reference.

[0215] In other RNA mimetics suitable or contemplated for use in iRNAs, both the sugar and the internucleoside linkage, i.e., the backbone, of the nucleotide units are replaced with alternate groups. The nucleobase units are maintained for hybridization with an appropriate nucleic acid target compound. One such oligomeric compound, an RNA mimetic that has been shown to have excellent hybridization properties, is referred to as a peptide nucleic acid (PNA). In PNA compounds, the sugar backbone of an RNA is replaced with an amide containing backbone, in particular an aminoethylglycine backbone. The nucleobases are retained and are bound directly or indirectly to aza nitrogen atoms of the amide portion of the backbone. Representative U.S. patents that teach the preparation of PNA compounds include, but are not limited to, U.S. Pat. Nos. 5,539,082; 5,714,331; and 5,719,262, each of which is herein incorporated by reference. Further teaching of PNA compounds can be found, for example, in Nielsen et al., Science, 1991, 254, 1497-1500.

[0216] Some embodiments featured in the disclosure include RNAs with phosphorothioate backbones and oligonucleosides with heteroatom backbones, and in particular —CH₂—NH—CH₂—, —CH₂—N(CH₃)—O—CH₂— [known as a methylene (methylimino) or MMI backbone], —CH₂—O—N(CH₃)—CH₂—, —CH₂—N(CH₃)—N(CH₃)—CH₂— and —N(CH₃)—CH₂—CH₂— of the above-referenced U.S. Pat. No. 5,489,677, and the amide backbones of the above-referenced U.S. Pat. No. 5,602,240. In some embodiments, the RNAs featured herein have morpholino backbone structures of the above-referenced U.S. Pat. No. 5,034,506. The native phosphodiester backbone can be represented as —O—P(O)(OH)—OCH₂—.

[0217] Modified RNAs may also contain one or more substituted sugar moieties. The iRNAs, e.g., dsRNAs, featured herein can include one of the following at the 2′ position: OH; F; O—, S—, or N-alkyl; O—, S—, or N-alkenyl; O—, S- or N-alkynyl; or O-alkyl-O-alkyl, wherein the alkyl, alkenyl and alkynyl may be substituted or unsubstituted C₁ to C₁₀ alkyl or C₂ to C₁₀ alkenyl and alkynyl. Exemplary suitable modifications include O[(CH₂)ₙO]ₘCH₃, O(CH₂)·ₙOCH₃, O(CH₂)ₙNH₂, O(CH₂)ₙCH₃, O(CH₂)ₙONH₂, and O(CH₂)ₙON[(CH₂)ₙCH₃)]₂, where n and m are from 1 to about 10. In other embodiments, dsRNAs include one of the following at the 2′ position: C₁ to C₁₀ lower alkyl, substituted lower alkyl, alkaryl, aralkyl, O-alkaryl or O-aralkyl, SH, SCH₃, OCN, Cl, Br, CN, CF₃, OCF₃, SOCH₃, SO₂CH₃, ONO₂, NO₂, N₃, NH₂, heterocycloalkyl, heterocycloalkaryl, aminoalkylamino, polyalkylamino, substituted silyl, an RNA cleaving group, a reporter group, an intercalator, a group for improving the pharmacokinetic properties of an iRNA, or a group for improving the pharmacodynamic properties of an iRNA, and other substituents having similar properties. In some embodiments, the modification includes a 2′-methoxyethoxy (2′-O—CH₂CH₂OCH₃, also known as 2′-O-(2-methoxyethyl) or 2′-MOE) (Martin et al., Helv. Chim. Acta, 1995, 78:486-504) i.e., an alkoxy-alkoxy group. Another exemplary modification is 2′-dimethylaminooxyethoxy, i.e., a O(CH₂)₂ON(CH₃)₂ group, also known as 2′-DMAOE, and 2′-dimethylaminoethoxyethoxy (also known in the art as 2′-O-dimethylaminoethoxyethyl or 2′-DMAEOE), i.e., 2′-O—CH₂—O—CH₂—N(CH₃)₂.

[0218] In other embodiments, an iRNA agent comprises one or more (e.g., about 1, 2, 3, 4, 5, 6, 7, 8, 9, 10, or more) acyclic nucleotides (or nucleosides). In certain embodiments, the sense strand or the antisense strand, or both sense strand and antisense strand, include less than five acyclic nucleotides per strand (e.g., four, three, two or one acyclic nucleotides per strand). The one or more acyclic nucleotides can be found, for example, in the double-stranded region, of the sense or antisense strand, or both strands; at the 5′-end, the 3′-end, both of the 5′ and 3′-ends of the sense or antisense strand, or both strands, of the iRNA agent. In some embodiments, one or more acyclic nucleotides are present at positions 1 to 8 of the sense or antisense strand, or both. In some embodiments, one or more acyclic nucleotides are found in the antisense strand at positions 4 to 10 (e.g., positions 6-8) from the 5′-end of the antisense strand. In some embodiments, the one or more acyclic nucleotides are found at one or both 3′-terminal overhangs of the iRNA agent.

[0219] The term “acyclic nucleotide” or “acyclic nucleoside” as used herein refers to any nucleotide or nucleoside having an acyclic sugar, e.g., an acyclic ribose. An exemplary acyclic nucleotide or nucleoside can include a nucleobase, e.g., a naturally occurring or a modified nucleobase (e.g., a nucleobase as described herein). In certain embodiments, a bond between any of the ribose carbons (C1, C2, C3, C4, or C5), is independently or in combination absent from the nucleotide. In some embodiments, the bond between C2-C3 carbons of the ribose ring is absent, e.g., an acyclic 2′-3′-seco-nucleotide monomer. In other embodiments, the bond between C1-C2, C3-C4, or C4-C5 is absent (e.g., a 1′-2′, 3′-4′ or 4′-5′-seco nucleotide monomer). Exemplary acyclic nucleotides are disclosed in U.S. Pat. No. 8,314,227, incorporated herein by reference in its entirely. For example, an acyclic nucleotide can include any of monomers D-J in FIGS. 1-2 of U.S. Pat. No. 8,314,227. In some embodiments, the acyclic nucleotide includes the following monomer:

[chemical structure]

[0220] wherein Base is a nucleobase, e.g., a naturally occurring or a modified nucleobase (e.g., a nucleobase as described herein).

[0221] In certain embodiments, the acyclic nucleotide can be modified or derivatized, e.g., by coupling the acyclic nucleotide to another moiety, e.g., a ligand (e.g., a GalNAc, a cholesterol ligand), an alkyl, a polyamine, a sugar, a polypeptide, among others.

[0222] In other embodiments, the iRNA agent includes one or more acyclic nucleotides and one or more LNAs (e.g., an LNA as described herein). For example, one or more acyclic nucleotides and/or one or more LNAs can be present in the sense strand, the antisense strand, or both. The number of acyclic nucleotides in one strand can be the same or different from the number of LNAs in the opposing strand. In certain embodiments, the sense strand and/or the antisense strand comprises less than five LNAs (e.g., four, three, two or one LNAs) located in the double stranded region or a 3′-overhang. In other embodiments, one or two LNAs are located in the double stranded region or the 3′-overhang of the sense strand. Alternatively, or in combination, the sense strand and/or antisense strand comprises less than five acyclic nucleotides (e.g., four, three, two or one acyclic nucleotides) in the double-stranded region or a 3′-overhang. In some embodiments, the sense strand of the iRNA agent comprises one or two LNAs in the 3′-overhang of the sense strand, and one or two acyclic nucleotides in the double-stranded region of the antisense strand (e.g., at positions 4 to 10 (e.g., positions 6-8) from the 5′-end of the antisense strand) of the iRNA agent.

[0223] In other embodiments, inclusion of one or more acyclic nucleotides (alone or in addition to one or more LNAs) in the iRNA agent results in one or more (or all) of: (i) a reduction in an off-target effect; (ii) a reduction in passenger strand participation in RNAi; (iii) an increase in specificity of the guide strand for its target mRNA; (iv) a reduction in a microRNA off-target effect; (v) an increase in stability; or (vi) an increase in resistance to degradation, of the iRNA molecule.

[0224] Other modifications include 2′-methoxy (2′-OCH₃), 2′-5 aminopropoxy (2′-OCH₂CH₂CH₂NH₂) and 2′-fluoro (2′-F). Similar modifications may also be made at other positions on the RNA of an iRNA, particularly the 3′ position of the sugar on the 3′ terminal nucleotide or in 2′-5′ linked dsRNAs and the 5′ position of 5′ terminal nucleotide. iRNAs may also have sugar mimetics such as cyclobutyl moieties in place of the pentofuranosyl sugar. Representative U.S. patents that teach the preparation of such modified sugar structures include, but are not limited to, U.S. Pat. Nos. 4,981,957; 5,118,800; 5,319,080; 5,359,044; 5,393,878; 5,446,137; 5,466,786; 5,514,785; 5,519,134; 5,567,811; 5,576,427; 5,591,722, 5,597,909; 5,610,300; 5,627,053; 5,639,873; 5,646,265; 5,658,873; 5,670,633; and 5,700,920, certain of which are commonly owned with the instant application, and each of which is herein incorporated by reference.

[0225] An iRNA may also include nucleobase (often referred to in the art simply as “base”) modifications or substitutions. As used herein, “unmodified” or “natural” nucleobases include the purine bases adenine (A) and guanine (G), and the pyrimidine bases thymine (T), cytosine (C) and uracil (U). Modified nucleobases include other synthetic and natural nucleobases such as 5-methylcytosine (5-me-C), 5-hydroxymethyl cytosine, xanthine, hypoxanthine, 2-aminoadenine, 6-methyl and other alkyl derivatives of adenine and guanine, 2-propyl and other alkyl derivatives of adenine and guanine, 2-thiouracil, 2-thiothymine and 2-thiocytosine, 5-halouracil and cytosine, 5-propynyl uracil and cytosine, 6-azo uracil, cytosine and thymine, 5-uracil (pseudouracil), 4-thiouracil, 8-halo, 8-amino, 8-thiol, 8-thioalkyl, 8-hydroxyl anal other 8-substituted adenines and guanines, 5-halo, particularly 5-bromo, 5-trifluoromethyl and other 5-substituted uracils and cytosines, 7-methylguanine and 7-methyladenine, 8-azaguanine and 8-azaadenine, 7-deazaguanine and 7-daazaadenine and 3-deazaguanine and 3-deazaadenine.

[0226] Further modified nucleobases include those disclosed in U.S. Pat. No. 3,687,808, those disclosed in Modified Nucleosides in Biochemistry, Biotechnology and Medicine, Herdewijn, P. ed. Wiley-VCH, 2008; those disclosed in The Concise Encyclopedia of Polymer Science and Engineering, pages 858-859, Kroschwitz, J. L, ed. John Wiley & Sons, 1990, these disclosed by Englisch et al., Angewandte Chemie, International Edition, 1991, 30, 613, and those disclosed by Sanghvi, Y S., Chapter 15, dsRNA Research and Applications, pages 289-302, Crooke, S. T. and Lebleu, B., Ed., CRC Press, 1993. Certain of these modified nucleobases are particularly useful for increasing the binding affinity of the oligomeric compounds featured in the disclosure. These include 5-substituted pyrimidines, 6-azapyrimidines and N-2, N-6 and O-6 substituted purines, including 2-aminopropyladenine, 5-propynyluracil and 5-propynylcytosine. 5-methylcytosine substitutions have been shown to increase nucleic acid duplex stability by 0.6-1.2° C. (Sanghvi, Y. S., Crooke, S. T. and Lebleu, B., Eds., dsRNA Research and Applications, CRC Press, Boca Raton, 1993, pp. 276-278) and are exemplary base substitutions, even more particularly when combined with 2′-O-methoxyethyl sugar modifications.

[0227] Representative U.S. patents that teach the preparation of certain of the above noted modified nucleobases as well as other modified nucleobases include, but are not limited to, the above noted U.S. Pat. No. 3,687,808, as well as U.S. Pat. Nos. 4,845,205; 5,130,302; 5,134,066; 5,175,273; 5,367,066; 5,432,272; 5,457,187; 5,459,255; 5,484,908; 5,502,177; 5,525,711; 5,552,540; 5,587,469; 5,594,121, 5,596,091; 5,614,617; 5,681,941; 6,015,886; 6,147,200; 6,166,197; 6,222,025; 6,235,887; 6,380,368; 6,528,640; 6,639,062; 6,617,438; 7,045,610; 7,427,672; and 7,495,088, each of which is herein incorporated by reference, and U.S. Pat. No. 5,750,692, also herein incorporated by reference.

[0228] The RNA of an iRNA can also be modified to include one or more (e.g., about 1, 2, 3, 4, 5, 6, 7, 8, 9, 10, or more) bicyclic sugar moieties. A “bicyclic sugar” is a furanosyl ring modified by the bridging of two atoms. A “bicyclic nucleoside” (“BNA”) is a nucleoside having a sugar moiety comprising a bridge connecting two carbon atoms of the sugar ring, thereby forming a bicyclic ring system. In certain embodiments, the bridge connects the 4′-carbon and the 2′-carbon of the sugar ring. Thus, in some embodiments an agent of the disclosure may include one or more locked nucleic acids (LNAs) (also referred to herein as “locked nucleotides”). In some embodiments, a locked nucleic acid is a nucleotide having a modified ribose moiety in which the ribose moiety comprises an extra bridge connecting, e.g., the 2′ and 4′ carbons. This structure effectively “locks” the ribose in the 3′-endo structural conformation. The addition of locked nucleic acids to siRNAs has been shown to increase siRNA stability in serum, increase thermal stability, and to reduce off-target effects (Elmen, J. et al., (2005) Nucleic Acid Research 33(1):439-447; Mook, O R. et al., (2007)Mol Canc Ther 6(3):833-843; Grunweller, A. e al., (2003) Nucleic Acid Research 31(12):3185-3193).

[0229] Examples of bicyclic nucleosides for use in the polynucleotides of the disclosure include without limitation nucleosides comprising a bridge between the 4′ and the 2′ ribosyl ring atoms. In certain embodiments, the antisense polynucleotide agents of the disclosure include one or more bicyclic nucleosides comprising a 4′ to 2′ bridge. Examples of such 4′ to 2′ bridged bicyclic nucleosides, include but are not limited to 4′-(CH₂)—O-2′ (LNA); 4′-(CH₂)—S-2′; 4′-(CH₂)2-O-2′ (ENA); 4′-CH(CH)—O-2′ (also referred to as “constrained ethyl” or “cEt”) and 4′-CH(CH₂OCH₃)—O-2′ (and analogs thereof; see, e.g., U.S. Pat. No. 7,399,845); 4′-C(CH₃)(CH₃)-2′ (and analogs thereof; see e.g., U.S. Pat. No. 8,278,283): 4′-CH₂—N(OCH₃)-2′ (and analogs thereof; see e.g., U.S. Pat. No. 8,278,425); 4′-CH₂—O—N(CH₃)-2′ (see, e.g., U.S. Patent Publication No. 2004/0171570); 4′-CH₂—N(R)—O-2′, wherein R is H, C₁-C₁₁ alkyl, or a protecting group (see, e.g., U.S. Pat. No. 7,427,672), 4′-CH₂—C(H)(CH₃)-2′ (see, e.g., Chattopadhyaya et al., J. Org. Chem., 2009, 74, 118-134); and 4′-CH₂—C(═CH₂)-2′ (and analogs thereof; see, e.g., U.S. Pat. No. 8,278,426). The contents of each of the foregoing are incorporated herein by reference for the methods provided therein. Representative U.S. patents that teach the preparation of locked nucleic acids include, but are not limited to, the following. U.S. Pat. Nos. 6,268,490; 6,670,461; 6,794,499; 6,998,484; 7,053,207; 7,084,125; 7,399,845, and 8,314,227, each of which is herein incorporated by reference in its entirety. Exemplary LNAs include but are not limited to, a 2′, 4′-C methylene bicyclo nucleotide (see for example Wengel et al., International PCT 5 Publication No. WO 00/66604 and WO 99/14226).

[0230] Any of the foregoing bicyclic nucleosides can be prepared having one or more stereochemical sugar configurations including for example α-L-ribofuranose and β-D-ribofuranose (see WO 99/14226).

[0231] A RNAi agent of the disclosure can also be modified to include one or more constrained ethyl nucleotides. As used herein, a “constrained ethyl nucleotide” or “cEt” is a locked nucleic acid comprising a bicyclic sugar moiety comprising a 4′-CH(CH3)-0-2′ bridge. In some embodiments, a constrained ethyl nucleotide is in the S conformation referred to herein as “S-cEt.”

[0232] A RNAi agent of the disclosure may also include one or more “conformationally restricted nucleotides” (“CRN”). CRN are nucleotide analogs with a linker connecting the C2′ and C4′ carbons of ribose or the C3 and -C5′ carbons of ribose. CRN lock the ribose ring into a stable conformation and increase the hybridization affinity to mRNA. The linker is of sufficient length to place the oxygen in an optimal position for stability and affinity resulting in less ribose ring puckering.

[0233] Representative publications that teach the preparation of certain of the above noted CRN include, but are not limited to, US 2013/0190383; and WO 2013/036868, the contents of each of which are hereby incorporated herein by reference for the methods provided therein.

[0234] In some embodiments, a RNAi agent of the disclosure comprises one or more monomers that are UNA (unlocked nucleic acid) nucleotides. UNA is unlocked acyclic nucleic acid, wherein any of the bonds of the sugar has been removed, forming an unlocked “sugar” residue. In one example, UNA also encompasses monomer with bonds between C1′-C4′ have been removed (i.e. the covalent carbon-oxygen-carbon bond between the C1′ and C4′ carbons). In another example, the C2′-C3′ bond (i.e. the covalent carbon-carbon bond between the C2′ and C3′ carbons) of the sugar has been removed (see Nuc. Acids Symp. Series, 52, 133-134 (2008) and Fluiter et al., Mol. Biosyst., 2009, 10, 1039).

[0235] Representative U.S. publications that teach the preparation of UNA include, but are not limited to, U.S. Pat. No. 8,314,227; and US Patent Publication Nos. 2013/0096289; 2013/0011922; and 2011/0313020, the contents of each of which are hereby incorporated herein by reference for the methods provided therein.

[0236] An RNAi agent of the disclosure may also include one or more “cyclohexene nucleic acids” or (“CeNA”). CeNA are nucleotide analogs with a replacement of the furanose moiety of DNA by a cyclohexene ring. Incorporation of cylcohexenyl nucleosides in a DNA chain increases the stability of a DNA/RNA hybrid. CeNA is stable against degradation in serum and a CeNA/RNA hybrid is able to activate E. Coli RNase H, resulting in cleavage of the RNA strand. (see Wang et al., Am. Chem. Soc. 2000, 122, 36, 8595-8602, hereby incorporated by reference).

[0237] In other embodiments, the iRNA agents include one or more (e.g., about 1, 2, 3, 4, 5, 6, 7, 8, 9, 10, or more) G-clamp nucleotides. A G-clamp nucleotide is a modified cytosine analog wherein the modifications confer the ability to hydrogen bond both Watson-Crick and Hoogsteen faces of a complementary guanine within a duplex, see for example Lin and Matteucci, 1998, J. Am. Chem. Soc., 120, 8531-8532. A single G-clamp analog substitution within an oligonucleotide can result in substantially enhanced helical thermal stability and mismatch discrimination when hybridized to complementary oligonucleotides. The inclusion of such nucleotides in the iRNA molecules can result in enhanced affinity and specificity to nucleic acid targets, complementary sequences, or template strands.

[0238] Potentially stabilizing modifications to the ends of RNA molecules can include N-(acetylaminocaproyl)-4-hydroxyprolinol (Hyp-C6-NHAc), N-(caproyl-4-hydroxyprolinol (Hyp-C6), N-(acetyl-4-hydroxyprolinol (Hyp-NHAc), thymidine-2′-O-deoxythymidine (ether), N-(aminocaproyl)-4-hydroxyprolinol (Hyp-C6-amino), 2-docosanoyl-uridine-3″-phosphate, inverted base dT(idT) and others. Disclosure of this modification can be found in PCT Publication No. WO 2011/005861.

[0239] Other modifications of a RNAi agent of the disclosure include a 5′ phosphate or 5′ phosphate mimic, e.g., a 5′-terminal phosphate or phosphate mimic on the antisense strand of a RNAi agent. Suitable phosphate mimics are disclosed in, for example US 2012/0157511, the contents of which are incorporated herein by reference for the methods provided therein. In one embodiment, the double stranded RNAi agent of the invention further comprises a 5′-phosphate or a 5′-phosphate mimic at the 5′ nucleotide of the antisense strand. In another embodiment, the double stranded RNAi agent further comprises a 5′-phosphate mimic at the 5′ nucleotide of the antisense strand. In a specific embodiment, the 5′-phosphate mimic is a 5′-vinyl phosphonate (5′-VP). In one embodiment, the phosphate mimic is a 5′-cyclopropyl phosphonate (VP). In some embodiments, the 5′-end of the antisense strand of the double-stranded iRNA agent does not contain a 5′-vinyl phosphonate (VP).

[0240] In one embodiment, at least one of the modified nucleotides is selected from the group consisting of a deoxy-nucleotide, a 2′-O-methyl modified nucleotide, a 2′-fluoro modified nucleotide, a 2′-deoxy-modified nucleotide, a glycol modified nucleotide (GNA), e.g., Ggn, Cgn, Tgn, or Agn, a nucleotide with a 2′ phosphate, e.g., G2p, C2p, A2p or U2p, and, a vinyl-phosphonate nucleotide; and combinations thereof. In other embodiments, each of the duplexes of Tables 5, 6, 8, and 10 may be particularly modified to provide another double-stranded iRNA agent of the present disclosure. In one example, the 3′-terminus of each sense duplex may be modified by removing the 3′-terminal L % ligand and exchanging the two phosphodiester internucleotide linkages between the three 3′-terminal nucleotides with phosphorothioate internucleotide linkages. That is, the three 3′-terminal nucleotides (N) of a sense sequence of the formula:

$${5}^{′} - N 1 - … - Nn - 2 Nn - 1 NnL {963}^{′}$$

may be replaced with

$${5}^{′} - N 1 - … - Nn - 2 sNn - 1 sNn {3}^{′} .$$

That is, for example, AD-1559459, the sense sequence:

asgsaucgGfuGfCfCfgauuccugcuL96

may be replaced with

asgsaucgGfuGfCfCfgauuccugscsu

while the antisense sequence remains unchanged to provide another double-stranded iRNA agent of the present disclosure.

### III. iRNA Motifs

[0241] In certain aspects of the disclosure, the double-stranded RNAi agents of the disclosure include agents with chemical modifications as disclosed, for example, in WO 2013/075035, the contents of which are incorporated herein by reference for the methods provided therein. As shown herein and in WO 2013/075035, a superior result may be obtained by introducing one or more motifs of three identical modifications on three consecutive nucleotides into a sense strand or antisense strand of an RNAi agent, particularly at or near the cleavage site. In some embodiments, the sense strand and antisense strand of the RNAi agent may otherwise be completely modified. The introduction of these motifs interrupts the modification pattern, if present, of the sense or antisense strand. The RNAi agent may be optionally conjugated with a lipophilic moiety or ligand, e.g., a C16 moiety or ligand, for instance on the sense strand. The RNAi agent may be optionally modified with a (S)-glycol nucleic acid (GNA) modification, for instance on one or more residues of the antisense strand. The resulting RNAi agents present superior gene silencing activity.

[0242] In some embodiments, the sense strand sequence may be represented by formula (I):

$${5}^{′} {n}_{p} - {N}_{a} - {( XXX )}_{i} - {N}_{b} - YYY - {N}_{b} - {( ZZZ )}_{j} - {N}_{a} - {n}_{q} {3}^{′} \qquad ( I )$$

[0243] wherein:
[0244] i and j are each independently 0 or 1;
[0245] p and q are each independently 0-6;
[0246] each Nₐ independently represents an oligonucleotide sequence comprising 0-25 modified nucleotides, each sequence comprising at least two differently modified nucleotides;
[0247] each N_{b} independently represents an oligonucleotide sequence comprising 0-10 modified nucleotides;
[0248] each nₚ and n_{q} independently represent an overhang nucleotide;
[0249] wherein N_{b} and Y do not have the same modification; and
[0250] XXX, YYY and ZZZ each independently represent one motif of three identical modifications on three consecutive nucleotides. In some embodiments, YYY is all 2′-F modified nucleotides.

[0251] In some embodiments, the Nₐ and/or N_{b} comprise modifications of alternating pattern.

[0252] In some embodiments, the YYY motif occurs at or near the cleavage site of the sense strand. For example, when the RNAi agent has a duplex region of 17-23 nucleotides in length, the YYY motif can occur at or the vicinity of the cleavage site (e.g.: can occur at positions 6, 7, 8; 7, 8, 9; 8, 9, 10; 9, 10, 11; 10, 11, 12 or 11, 12, 13) of the sense strand, the count starting from the 1^{st} nucleotide, from the 5′-end; or optionally, the count starting at the 1ₛₜ paired nucleotide within the duplex region, from the 5′-end.

[0253] In some embodiments, i is 1 and j is 0, or i is 0 and j is 1, or both i and j are 1. The sense strand can therefore be represented by the following formulas:

$${5}^{′} {n}_{p} - {N}_{a} - YYY - {N}_{b} - ZZZ - {N}_{a} - {n}_{q} {3}^{′} ; \qquad ( Ib )$$

$${5}^{′} {n}_{p} - {N}_{a} - XXX - {N}_{b} - YYY - {N}_{a} - {n}_{q} {3}^{′} ; or \qquad ( Ic )$$

$${5}^{′} {n}_{p} - {N}_{a} - XXX - {N}_{b} - YYY - {N}_{b} - ZZZ - {N}_{a} - {n}_{q} {3}^{′} . \qquad ( Id )$$

[0254] When the sense strand is represented by formula (Ib), N_{b} represents an oligonucleotide sequence comprising 0-10, 0-7, 0-5, 0-4, 0-2 or 0 modified nucleotides. Each Nₐ independently can represent an oligonucleotide sequence comprising 2-20, 2-15, or 2-10 modified nucleotides.

[0255] When the sense strand is represented as formula (Ic), N_{b} represents an oligonucleotide sequence comprising 0-10, 0-7, 0-5, 0-4, 0-2 or 0 modified nucleotides. Each N₃ can independently represent an oligonucleotide sequence comprising 2-20, 2-15, or 2-10 modified nucleotides.

[0256] When the sense strand is represented as formula (Id), each N_{b} independently represents an oligonucleotide sequence comprising 0-10, 0-7, 0-5, 0-4, 0-2 or 0 modified nucleotides. In some embodiments, N_{b} is 0, 1, 2, 3, 4, 5 or 6. Each Nₐ can independently represent an oligonucleotide sequence comprising 2-20, 2-15, or 2-10 modified nucleotides.

[0257] Each of X, Y and Z may be the same or different from each other.

[0258] In other embodiments, i is 0 and j is 0, and the sense strand may be represented by the formula:

$${5}^{′} {n}_{p} - {N}_{a} - YYY - {N}_{a} - {n}_{q} {3}^{′} . \qquad ( Ia )$$

[0259] When the sense strand is represented by formula (Ia), each Nₐ independently can represent an oligonucleotide sequence comprising 2-20, 2-15, or 2-10 modified nucleotides.

[0260] In some embodiments, the antisense strand sequence of the RNAi may be represented by formula (Ie):

$${5}^{′} {n}_{{q}^{′}} - {N}_{a}^{′} - {( {Z}^{′} {Z}^{′} {Z}^{′} )}_{k} - {N}_{b}^{′} - {Y}^{′} {Y}^{′} {Y}^{′} - {N}_{b}^{′} - {( {X}^{′} {X}^{′} {X}^{′} )}_{1} - {N}_{a}^{′} - {n}_{p}^{′} {3}^{′} \qquad ( Ie )$$

wherein:
[0261] k and l are each independently 0 or 1;
[0262] p′ and q′ are each independently 0-6;
[0263] each Nₐ′ independently represents an oligonucleotide sequence comprising 0-25 modified nucleotides, each sequence comprising at least two differently modified nucleotides;
[0264] each N_{b}′ independently represents an oligonucleotide sequence comprising 0-10 modified nucleotides;
[0265] each nₚ′ and n_{q}′ independently represent an overhang nucleotide;
[0266] wherein N_{b}′ and Y′ do not have the same modification;
[0267] and
[0268] X′X′X′, Y′Y′Y′, and Z′Z′Z′ each independently represent one of three identical modification on three consecutive nucleotides.

[0269] In some embodiments, the Nₐ′ and/or N_{b}′ comprise modification of alternating pattern.

[0270] The Y′Y′Y′ motif occurs at or near the cleavage site of the antisense strand. For example, when the RNAi agent has a duplex region of 17-23 nucleotides in length, the Y′Y′Y′ motif can occur at positions 9, 10, 11; 10, 11, 12; 11, 12, 13; 12, 13, 14; or 13, 14, 15 of the antisense strand, with the count starting from the 1^{st} nucleotide, from the 5′-end; or optionally, the count starting at the 1^{st} paired nucleotide within the duplex region, from the 5′-end. In some embodiments, the Y′Y′Y′ motif occurs at positions 11, 12, 13.

[0271] In some embodiments, Y′Y′Y′ motif is all 2′-O-me modified nucleotides.

[0272] In on embodiment, k is 1 and l is 0, or k is 0 and l is 1, or both 5 k and l are 1.

[0273] The antisense strand can therefore be represented by the following formulas:

$${5}^{′} {n}_{{q}^{′}} - {N}_{a}^{′} - {Z}^{′} {Z}^{′} {Z}^{′} - {N}_{b}^{′} - {Y}^{′} {Y}^{′} {Y}^{′} - {N}_{a}^{′} - {n}_{p}^{′} {3}^{′} ; \qquad ( Ig )$$

$${5}^{′} {n}_{{q}^{′}} - {N}_{a}^{′} - {Y}^{′} {Y}^{′} {Y}^{′} - {N}_{b}^{′} - {X}^{′} {X}^{′} {X}^{′} - {n}_{p}^{′} {3}^{′} ; or \qquad ( Ih )$$

$${5}^{′} {n}_{{q}^{′}} - {N}_{a}^{′} - {Z}^{′} {Z}^{′} {Z}^{′} - {N}_{b}^{′} - {Y}^{′} {Y}^{′} {Y}^{′} - {N}_{b}^{′} - {X}^{′} {X}^{′} {X}^{′} - {N}_{a}^{′} - {n}_{p}^{′} {3}^{′} . \qquad ( Ii )$$

[0274] When the antisense strand is represented by formula (IgIb), N_{b′} represents an oligonucleotide sequence comprising 0-10, 0-7, 0-5, 0-4, 0-2 or 0 modified nucleotides. Each Nₐ′ independently represents an oligonucleotide sequence comprising 2-20, 2-15, or 2-10 modified nucleotides.

[0275] When the antisense strand is represented as formula (Ii), each N_{b}′ independently represents an oligonucleotide sequence comprising 0-10, 0-7, 0-5, 0-4, 0-2 or 0 modified nucleotides. Each Nₐ′ independently represents an oligonucleotide sequence comprising 2-20, 2-15, or 2-10 modified nucleotides. In some embodiments, N_{b} is 0, 1, 2, 3, 4, 5 or 6.

[0276] In other embodiments, k is 0 and l is 0 and the antisense strand may be represented by the formula:

$${5}^{′} {n}_{{p}^{′}} - {N}_{a}^{′} - {Y}^{′} {Y}^{′} {Y}^{′} - {N}_{{a}^{′}} - {n}_{{q}^{′}} {3}^{′} . \qquad ( If )$$

[0277] When the antisense strand is represented as formula (If), each Nₐ′ independently represents an oligonucleotide sequence comprising 2-20, 2-15, or 2-10 modified nucleotides.

[0278] Each of X′, Y′ and Z′ may be the same or different from each other.

[0279] Each nucleotide of the sense strand and antisense strand may be independently modified with LNA, HNA, CeNA, GNA, 2′-methoxyethyl, 2′-O-methyl, 2′-O-allyl, 2′-C-allyl, 2′-hydroxyl, or 2′-fluoro. For example, each nucleotide of the sense strand and antisense strand is independently modified with 2′-O-methyl or 2′-fluoro. Each X, Y, Z, X′, Y′ and Z′, in particular, may represent a 2′-O-methyl modification or a 2′-fluoro modification.

[0280] In some embodiments, the sense strand of the RNAi agent may contain YYY motif occurring at 9, 10 and 11 positions of the strand when the duplex region is 21 nt, the count starting from the 1^{st} nucleotide from the 5′-end, or optionally, the count starting at the 1^{st} paired nucleotide within the duplex region, from the 5′-end; and Y represents 2′-F modification. The sense strand may additionally contain XXX motif or ZZZ motifs as wing modifications at the opposite end of the duplex region; and XXX and ZZZ each independently represents a 2′-OMe modification or 2′-F modification.

[0281] In some embodiments the antisense strand may Y′Y′Y′ motif occurring at positions 11, 12, 13 of the strand, the count starting from the 1¹ nucleotide from the 5′-end, or optionally, the count starting at the 1^{st} paired nucleotide within the duplex region, from the 5′-end; and Y′ represents 2′-O-methyl modification. The antisense strand may additionally contain X′X′X′ motif or Z′Z′Z′ motifs as wing modifications at the opposite end of the duplex region; and X′X′X′ and Z′Z′Z′ each independently represents a 2′-OMe modification or 2′-F modification.

[0282] The sense strand represented by any one of the above formulas (Ia), (Ib), (Ic), and (Id) forms a duplex with an antisense strand being represented by any one of formulas (If), (Ig), (Ih), and (Ii), respectively.

[0283] Accordingly, certain RNAi agents for use in the methods of the disclosure may comprise a sense strand and an antisense strand, each strand having 14 to 30 nucleotides, the RNAi duplex represented by formula (Ij):

[chemical structure]

[0284] wherein,
[0285] i, j, k, and l are each independently 0 or 1;
[0286] p, p′, q, and q′ are each independently 0-6;
[0287] each Nₐ and Nₐ′ independently represents an oligonucleotide sequence comprising 0-25 modified nucleotides, each sequence comprising at least two differently modified nucleotides;
[0288] each N_{b} and N_{b}′ independently represents an oligonucleotide sequence comprising 0-10 modified nucleotides;
[0289] wherein
[0290] each nₚ′, nₚ, n_{q}′, and n_{q}, each of which may or may not be present independently represents an overhang nucleotide; and
[0291] XXX, YYY, ZZZ, X′X′X′, Y′Y′Y′, and Z′Z′Z′ each independently represent one motif of three identical modifications on three consecutive nucleotides.

[0292] In some embodiments, i is 0 and j is 0; or i is 1 and j is 0; or i is 0 and j is 1; or both i and j are 0; or both i and j are 1. In some embodiments, k is 0 and l is 0; or k is 1 and l is 0; k is 0 and l is 1; or both k and l are 0; or both k and l are 1.

[0293] Exemplary combinations of the sense strand and antisense strand forming a RNAi duplex include the formulas below:

[chemical structure]

[0294] When the RNAi agent is represented by formula (Ik), each Nₐ independently represents an oligonucleotide sequence comprising 2-20, 2-15, or 2-10 modified nucleotides.

[0295] When the RNAi agent is represented by formula (Il), each N_{b} independently represents an oligonucleotide sequence comprising 1-10, 1-7, 1-5 or 1-4 modified nucleotides. Each Nₐ independently represents an oligonucleotide sequence comprising 2-20, 2-15, or 2-10 modified nucleotides.

[0296] When the RNAi agent is represented as formula (Im), each N_{b}, N_{b}′ independently represents an oligonucleotide sequence comprising 0-10, 0-7, 0-5, 0-4, 0-2 or 0 modified nucleotides. Each Nₐ independently represents an oligonucleotide sequence comprising 2-20, 2-15, or 2-10 modified nucleotides.

[0297] When the RNAi agent is represented as formula (In), each N_{b}, N_{b}′ independently represents an oligonucleotide sequence comprising 0-10, 0-7, 0-5, 0-4, 0-2 or 0 modified nucleotides. Each Nₐ, Nₐ′ independently represents an oligonucleotide sequence comprising 2-20, 2-15, or 2-10 modified nucleotides. Each of Nₐ, Nₐ′, N_{b} and N_{b}′ independently comprises modifications of alternating pattern.

[0298] Each of X, Y and Z in formulas (Ij), (Ik), (Il), (Im), and (In) may be the same or different from each other.

[0299] When the RNAi agent is represented by formula (Ij), (Ik), (Il), (Im), and (In), at least one of the Y nucleotides may form a base pair with one of the Y′ nucleotides. Alternatively, at least two of the Y nucleotides form base pairs with the corresponding Y′ nucleotides; or all three of the Y nucleotides all form base pairs with the corresponding Y′ nucleotides.

[0300] When the RNAi agent is represented by formula (Il) or (In), at least one of the Z nucleotides may form abase pair with one of the Z′ nucleotides. Alternatively, at least two of the Z nucleotides form base pairs with the corresponding Z′ nucleotides; or all three of the Z nucleotides all form base pairs with the corresponding Z′ nucleotides.

[0301] When the RNAi agent is represented as formula (Im) or (In), at least one of the X nucleotides may form a base pair with one of the X′ nucleotides. Alternatively, at least two of the X nucleotides form base pairs with the corresponding X′ nucleotides; or all three of the X nucleotides all form base pairs with the corresponding X′ nucleotides.

[0302] In some embodiments, the modification on the Y nucleotide is different than the modification on the Y′ nucleotide, the modification on the Z nucleotide is different than the modification on the Z′ nucleotide, and/or the modification on the X nucleotide is different than the modification on the X′ nucleotide.

[0303] In some embodiments, when the RNAi agent is represented by formula (IIId), the Nₐ modifications are 2′-O-methyl or 2′-fluoro modifications. In some embodiments, when the RNAi agent is represented by formula (In), the Nₐ modifications are 2′-O-methyl or 2′-fluoro modifications and nₚ′>0 and at least one nₚ′ is linked to a neighboring nucleotide a via phosphorothioate linkage. In some embodiments, when the RNAi agent is represented by formula (In), the Nₐ modifications are 2′-O-methyl or 2′-fluoro modifications, nₚ′>0 and at least one nₚ′ is linked to a neighboring nucleotide via phosphorothioate linkage, and the sense strand is conjugated to one or more moieties or ligands (e.g, one or more lipophilic moieties, optionally one or more C16 moieties, or one or more GalNAc moieties) attached through a bivalent or trivalent branched linker. In some embodiments, when the RNAi agent is represented by formula (In), the Nₐ modifications are 2′-O-methyl or 2′-fluoro modifications, nₚ′>0 and at least one nₚ′ is linked to a neighboring nucleotide via phosphorothioate linkage, the sense strand comprises at least one phosphorothioate linkage, and the sense strand is conjugated to one or more moieties or ligands (e.g., one or more lipophilic moieties, optionally one or more C16 moieties, or one or more GalNAc moieties) attached through a bivalent or trivalent branched linker.

[0304] In some embodiments, when the RNAi agent is represented by formula (Ik), the Nₐ modifications are 2′-O-methyl or 2′-fluoro modifications, nₚ′>0 and at least one nₚ′ is linked to a neighboring nucleotide via phosphorothioate linkage, the sense strand comprises at least one phosphorothioate linkage, and the sense strand is conjugated to one or more moieties or ligands (e.g., one or more lipophilic moieties, optionally one or more C16 moieties, or one or more GalNAc moieties) attached through a bivalent or trivalent branched linker.

[0305] In some embodiments, the RNAi agent is a multimer containing at least two duplexes represented by formula (Ij), (Ik), (Il), (Im), and (In), wherein the duplexes are connected by a linker. The linker can be cleavable or non-cleavable. Optionally, the multimer further comprises a ligand. Each of the duplexes can target the same gene or two different genes; or each of the duplexes can target same gene at two different target sites.

[0306] In some embodiments, the RNAi agent is a multimer containing three, four, five, six or more duplexes represented by formula (Ij), (Ik), (Il), (Im), and (In), wherein the duplexes are connected by a linker. The linker can be cleavable or non-cleavable. Optionally, the multimer further comprises a ligand. Each of the duplexes can target the same gene or two different genes; or each of the duplexes can target same gene at two different target sites.

[0307] In some embodiments, two RNAi agents represented by formula (Ij), (Ik), (Il), (Im), and (In) are linked to each other at the 5′ end, and one or both of the 3′ ends and are optionally conjugated to a ligand. Each of the agents can target the same gene or two different genes; or each of the agents can target same gene at two different target sites.

[0308] Various publications describe multimeric RNAi agents that can be used in the methods of the disclosure. Such publications include WO2007/091269, WO2010/141511, WO2007/117686, WO2009/014887, and WO2011/031520; and U.S. Pat. No. 7,858,769, the contents of each of which are hereby incorporated herein by reference for the methods provided therein. In certain embodiments, the RNAi agents of the disclosure may include GalNAc ligands.

[0309] As described in more detail below, the RNAi agent that contains conjugations of one or more carbohydrate moieties to a RNAi agent may improve one or more properties of the RNAi agent. In many cases, the carbohydrate moiety will be attached to a modified subunit of the RNAi agent. For example, the ribose sugar of one or more ribonucleotide subunits of a dsRNA agent can be replaced with another moiety, e.g., a non-carbohydrate (e.g., cyclic) carrier to which is attached a carbohydrate ligand. A ribonucleotide subunit in which the ribose sugar of the subunit has been so replaced is referred to herein as a ribose replacement modification subunit (RRMS). A cyclic carrier may be a carbocyclic ring system, i.e., all ring atoms are carbon atoms, or a heterocyclic ring system, i.e., one or more ring atoms may be a heteroatom, e.g., nitrogen, oxygen, sulfur. The cyclic carrier may be a monocyclic ring system, or may contain two or more rings, e.g. fused rings. The cyclic carrier may be a fully saturated ring system, or it may contain one or more double bonds.

[0310] The ligand may be attached to the polynucleotide via a carrier. The carriers include (i) at least one “backbone attachment point,” such as two “backbone attachment points” and (ii) at least one “tethering attachment point.” A “backbone attachment point” as used herein refers to a functional group, e.g. a hydroxyl group, or generaly, a bond available for, and that is suitable for incorporation of the carrier into the backbone, e.g., the phosphate, or modified phosphate, e.g., sulfur containing, backbone, of a ribonucleic acid. A “tethering attachment point” (TAP) in some embodiments refers to a constituent ring atom of the cyclic carrier, e.g., a carbon atom or a heteroatom (distinct from an atom which provides a backbone attachment point), that connects a selected moiety. The moiety can be, e.g., a carbohydrate, e.g. monosaccharide, disaccharide, trisaccharide, tetrasaccharide, oligosaccharide, and polysaccharide. Optionally, the selected moiety is connected by an intervening tether to the cyclic carrier. Thus, the cyclic carrier will often include a functional group, e.g., an amino group, or generally, provide a bond, that is suitable for incorporation or tethering of another chemical entity, e.g., a ligand to the constituent ring.

[0311] The RNAi agents may be conjugated to a ligand via a carrier, wherein the carrier can be cyclic group or acyclic group. The cyclic group can be selected from pyrrolidinyl, pyrazolinyl, pyrazolidinyl, imidazolinyl, imidazolidinyl, piperidinyl, piperazinyl, [1,3]dioxolane, oxazolidinyl, isoxazolidinyl, morpholinyl, thiazolidinyl, isothiazolidinyl, quinoxalinyl, pyridazinonyl, tetrahydrofuryl and and decalin. The acyclic group can be a serinol backbone or diethanolamine backbone.

[0312] In certain specific embodiments, the RNAi agent for use in the methods of the disclosure is an agent selected from the group of agents listed in any one of Tables 3-10. These agents may further comprise a ligand. The ligand can be attached to the sense strand, antisense strand or both strands, at the 3′-end, 5′-end, or both ends. For instance, the ligand may be conjugated to the sense strand, in particular, the 3′-end of the sense strand.

### IV. iRNA Conjugates

[0313] The iRNA agents disclosed herein can be in the form of conjugates. The conjugate may be attached at any suitable location in the iRNA molecule, e.g., at the 3′ end or the 5′ end of the sense or the antisense strand. The conjugates are optionally attached via a linker.

[0314] In some embodiments, an iRNA agent described herein is chemically linked to one or more ligands, moieties or conjugates, which may confer functionality, e.g., by affecting (e.g., enhancing) the activity, cellular distribution or cellular uptake of the iRNA. Such moieties include but are not limited to lipid moieties such as a cholesterol moiety (Letsinger et al., Proc. Natl. Acid Sci. USA, 1989, 86: 6553-6556), cholic acid (Manoharan et al., Biorg. Med. Chem. Let., 1994, 4:1053-1060), a thioether, e.g., beryl-S-tritylthiol (Manoharan et al., Ann. N.Y. Acad. Sci., 1992, 660:306-309; Manoharan et al., Biorg. Med Chem. Let., 1993, 3:2765-2770), a thiocholesterol (Oberhauser et al., Nucl. Acids Res., 1992, 20:533-538), an aliphatic chain, e.g., dodecandiol or undecyl residues (Saison-Behmoaras et al., EMBO J, 1991, 10:1111-1118; Kabanov et al., FEBS Lett., 1990, 259:327-330; Svinarchuk et al., Biochimie, 1993, 75:49-54), a phospholipid, e.g., di-hexadecyl-rac-glycerol or triethyl-ammonium 1,2-di-O-hexadecyl-rac-glycero-3-phosphonate (Manoharan et al., Tetrahedron Lett., 1995, 36:3651-3654; Shea et al., Nucl. Acids Res., 1990, 18:3777-3783), a polyamine or a polyethylene glycol chain (Manoharan et al., Nucleosides & Nucleotides, 1995, 14:969-973), or adamantane acetic acid (Manoharan et al., Tetrahedron Lett., 1995, 36:3651-3654), a palmityl moiety (Mishra et al., Biochim. Biophys. Acta, 1995, 1264:229-237), or an octadecylamine or hexylamino-carbonyloxycholesterol moiety (Crooke et al., J. Pharmacol. Exp. Ther., 1996, 277:923-937).

[0315] In some embodiments, a ligand alters the distribution, targeting or lifetime of an iRNA agent into which it is incorporated. In some embodiments, a ligand provides an enhanced affinity for a selected target, e.g., molecule, cell or cell type, compartment, e.g., a cellular or organ compartment, tissue, organ or region of the body, as, e.g., compared to a species absent such a ligand. Typical ligands will not take part in duplex pairing in a duplexed nucleic acid.

[0316] Ligands can include a naturally occurring substance, such as a protein (e.g., human serum albumin (HSA), low-density lipoprotein (LDL), or globulin); carbohydrate (e.g., a dextran, pullulan, chitin, chitosan, inulin, cyclodextrin or hyaluronic acid); or a lipid. The ligand may also be a recombinant or synthetic molecule, such as a synthetic polymer, e.g., a synthetic polyamino acid. Examples of polyamino acids include polyamino acid is a polylysine (PLL), poly L-aspartic acid, poly L-glutamic acid, styrene-maleic acid anhydride copolymer, poly(L-lactide-co-glycolied) copolymer, divinyl ether-maleic anhydride copolymer, N-(2-hydroxypropyl)methacrylamide copolymer (HMPA), polyethylene glycol (PEG), polyvinyl alcohol (PVA), polyurethane, poly(2-ethylacryllic acid), N-isopropylacrylamide polymers, or polyphosphazine. Examples of polyamines include: polyethylenimine, polylysine (PLL), spermine, spermidine, polyamine, pseudopeptide-polyamine, peptidomimetic polyamine, dendrimer polyamine, arginine, amidine, protamine, cationic lipid, cationic porphyrin, quaternary salt of a polyamine, or an α helical peptide.

[0317] Ligands can also include targeting groups, e.g., a cell or tissue targeting agent, e.g., a lectin, glycoprotein, lipid or protein, e.g., an antibody, that binds to a specified cell type such as an ocular cell. A targeting group can be a thyrotropin, melanotropin, lectin, glycoprotein, surfactant protein A, Mucin carbohydrate, multivalent lactose, multivalent galactose, N-acetyl-galactosamine, N-acetyl-gulucosamine multivalent mannose, multivalent fucose, glycosylated polyaminoacids, multivalent galactose, transferrin, bisphosphonate, polyglutamate, polyaspartate, a lipid, cholesterol, a steroid, bile acid, folate, vitamin B12, biotin, or an RGD peptide or RGD peptide mimetic.

[0318] Other examples of ligands include dyes, intercalating agents (e.g. acridines), cross-linkers (e.g. psoralene, mitomycin C), porphyrins (TPPC4, texaphyrin, Sapphyrin), polycyclic aromatic hydrocarbons (e.g., phenazine, dihydrophenazine), artificial endonucleases (e.g. EDTA), lipophilic molecules, e.g., cholesterol, cholic acid, adamantane acetic acid, l-pyrene butyric acid, dihydrotestosterone, 1,3-Bis-O(hexadecyl)glycerol, geranyloxyhexyl group, hexadecylglycerol, borneol, menthol, 1,3-propanediol, heptadecyl group, palmitic acid, myristic acid, O3-(oleoyl)lithocholic acid, O3-(oleoyl)cholenic acid, dimethoxytrityl, or phenoxazine) and peptide conjugates (e.g., antennapedia peptide, Tat peptide), alkylating agents, phosphate, amino, mercapto, PEG (e.g., PEG-40K), mPEG, [mPEG]₂, polyamino, alkyl, substituted alkyl, radiolabeled markers, enzymes, haptens (e.g. biotin), transport/absorption facilitators (e.g., aspirin, vitamin E, folic acid), synthetic ribonucleases (e.g., imidazole, bisimidazole, histamine, imidazole clusters, acridine-imidazole conjugates, Eu3+ complexes of tetraazamacrocycles), dinitrophenyl, HRP, or AP.

[0319] Ligands can be proteins, e.g., glycoproteins, or peptides, e.g., molecules having a specific affinity for a co-ligand, or antibodies e.g., an antibody, that binds to a specified cell type such as an ocular cell. Ligands may also include hormones and hormone receptors. They can also include non-peptidic species, such as lipids, lectins, carbohydrates, vitamins, cofactors, multivalent lactose, multivalent galactose, N-acetyl-galactosamine, N-acetyl-glucosamine multivalent mannose, or multivalent fucose. The ligand can be, for example, a lipopolysaccharide, an activator of p38 MAP kinase, or an activator of NF-κB.

[0320] The ligand can be a substance, e.g., a drug, which can increase the uptake of the iRNA agent into the cell, for example, by disrupting the cell's cytoskeleton, e.g., by disrupting the cell's microtubules, microfilaments, and/or intermediate filaments. The drug can be, for example, taxon, vincristine, vinblastine, cytochalasin, nocodazole, japlakinolide, latrunculin A, phalloidin, swinholide A, indanocine, or myoservin.

[0321] In some embodiments, a ligand attached to an iRNA as described herein acts as a pharmacokinetic modulator (PK modulator). PK modulators include lipophiles, bile acids, steroids, phospholipid analogues, peptides, protein binding agents, polyethylene glycol (PEG), vitamins etc. Exemplary PK modulators include, but are not limited to, cholesterol, fatty acids, cholic acid, lithocholic acid, dialkylglycerides, diacylglyceride, phospholipids, sphingolipids, naproxen, ibuprofen, vitamin E, biotin etc. Oligonucleotides that comprise a number of phosphorothioate linkages are also known to bind to serum protein, thus short oligonucleotides, e.g., oligonucleotides of about 5 bases, 10 bases, 15 bases or 20 bases, comprising multiple of phosphorothioate linkages in the backbone are also amenable to the present disclosure as ligands (e.g. as PK modulating ligands). In addition, aptamers that bind serum components (e.g. serum proteins) are also suitable for use as PK modulating ligands in the embodiments described herein.

[0322] Ligand-conjugated oligonucleotides of the disclosure may be synthesized by the use of an oligonucleotide that bears a pendant reactive functionality, such as that derived from the attachment of a linking molecule onto the oligonucleotide (described below). This reactive oligonucleotide may be reacted directly with commercially available ligands, ligands that are synthesized bearing any of a variety of protecting groups, or ligands that have a linking moiety attached thereto.

[0323] The oligonucleotides used in the conjugates of the present disclosure may be conveniently and routinely made through the well-known technique of solid-phase synthesis. Equipment for such synthesis is sold by several vendors including, for example, Applied Biosystems (Foster City, Calif.). Any other means for such synthesis known in the art may additionally or alternatively be employed. It is also known to use similar techniques to prepare other oligonucleotides, such as the phosphorothioates and alkylated derivatives.

[0324] In the ligand-conjugated oligonucleotides and ligand-molecule bearing sequence-specific linked nucleosides of the present disclosure, the oligonucleotides and oligonucleosides may be assembled on a suitable DNA synthesizer utilizing standard nucleotide or nucleoside precursors, or nucleotide or nucleoside conjugate precursors that already bear the linking moiety, ligand-nucleotide or nucleoside-conjugate precursors that already bear the ligand molecule, or non-nucleoside ligand-bearing building blocks.

[0325] When using nucleotide-conjugate precursors that already bear a linking moiety, the synthesis of the sequence-specific linked nucleosides is typically completed, and the ligand molecule is then reacted with the linking moiety to form the ligand-conjugated oligonucleotide. In some embodiments, the oligonucleotides or linked nucleosides of the present disclosure are synthesized by an automated synthesizer using phosphoramidites derived from ligand-nucleoside conjugates in addition to the standard phosphoramidites and non-standard phosphoramidites that are commercially available and routinely used in oligonucleotide synthesis.

### A. Lipophilic Moieties

[0326] In certain embodiments, the lipophilic moiety is an aliphatic, cyclic such as alicyclic, or polycyclic such as polyalicyclic compound, such as a steroid (e.g., sterol) or a linear or branched aliphatic hydrocarbon. The lipophilic moiety may generally comprise a hydrocarbon chain, which may be cyclic or acyclic. The hydrocarbon chain may comprise various substituents or one or more heteroatoms, such as an oxygen or nitrogen atom. Such lipophilic aliphatic moieties include, without limitation, saturated or unsaturated C₄-C₃₀ hydrocarbon (e.g., C₆-C₁₈ hydrocarbon), saturated or unsaturated fatty acids, waxes (e.g., monohydric alcohol esters of fatty acids and fatty diamides), terpenes (e.g., C₁₀ terpenes, C₁₅ sesquiterpenes, C₂₀ diterpenes, C₃₀ triterpenes, and C₄₀ tetraterpenes), and other polyalicyclic hydrocarbons. For instance, the lipophilic moiety may contain a C₄-C₃₀ hydrocarbon chain (e.g., C₄-C₃₀alkyl or alkenyl). In some embodiments the lipophilic moiety contains a saturated or unsaturated C₆-C₁₈ hydrocarbon chain (e.g., a linear C₆-C₁₈ alkyl or alkenyl). In some embodiments, the lipophilic moiety contains a saturated or unsaturated C16 hydrocarbon chain (e.g., a linear C16 alkyl or alkenyl).

[0327] In some embodiments, the lipophilic moiety is a C6-C30 acid (e.g., hexanoic acid, heptanoic acid, octanoic acid, nonanoic acid, decanoic acid, undecanoic acid, dodcanoic acid, tridecanoic acid, tetradecanoic acid, pentadecanoic acid, hexadecanoic acid, heptadecanoic acid, octadecanoic acid, oleic acid, linoleic acid, arachidonic acid, cis-4,7,10,13,16,19-docosahexanoic acid, vitamin A, vitamin E, cholesterol etc.) or a C6-C30 alcohol (e.g., hexanol, heptanol, octanol, nonanol, decanol, undecanol, dodcanol, tridecanol, tetradecanol, pentadecanol, hexadecanol, heptadecanol, octadecanol, oleyl alcohol, linoleyl alcohol, arachidonic alcohol, cis-4,7,10,13,16,19-docosahexanol, retinol, vitamin E, cholesterol etc.).

[0328] The lipophilic moiety may be attached to the RNAi agent by any method known in the art, including via a functional grouping already present in the lipophilic moiety or introduced into the RNAi agent, such as a hydroxy group (e.g., —CO—CH₂—OH). The functional groups already present in the lipophilic moiety or introduced into the RNAi agent include, but are not limited to, hydroxyl, amine, carboxylic acid, sulfonate, phosphate, thiol, azide, and alkyne.

[0329] Conjugation of the RNAi agent and the lipophilic moiety may occur, for example, through formation of an ether or a carboxylic or carbamoyl ester linkage between the hydroxy and an alkyl group R—, an alkanoyl group RCO— or a substituted carbamoyl group RNHCO—. The alkyl group R may be cyclic (e.g., cyclohexyl) or acyclic (e.g., straight-chained or branched; and saturated or unsaturated). Alkyl group R may be a butyl, pentyl, hexyl, heptyl, octyl, nonyl, decyl, undecyl, dodecyl, tridecyl, tetradecyl, pentadecyl, hexadecyl, heptadecyl or octadecyl group, or the like.

[0330] In some embodiments, the lipophilic moiety is conjugated to the double-stranded RNAi agent via a linker a linker containing an ether, thioether, urea, carbonate, amine, amide, maleimide-thioether, disulfide, phosphodiester, sulfonamide linkage, a product of a click reaction (e.g., a triazole from the azide-alkyne cycloaddition), or carbamate.

[0331] In another embodiment, the lipophilic moiety is a steroid, such as sterol. Steroids are polycyclic compounds containing a perhydro-1,2-cyclopentanophenanthrene ring system. Steroids include, without limitation, bile acids (e.g., cholic acid, deoxycholic acid and dehydrocholic acid), cortisone, digoxigenin, testosterone, cholesterol, and cationic steroids, such as cortisone. A “cholesterol derivative” refers to a compound derived from cholesterol, for example by substitution, addition or removal of substituents.

[0332] In another embodiment, the lipophilic moiety is an aromatic moiety. In this context, the term “aromatic” refers broadly to mono- and polyaromatic hydrocarbons. Aromatic groups include, without limitation, C₆-C₁₄ aryl moieties comprising one to three aromatic rings, which may be optionally substituted; “aralkyl” or “arylalkyl” groups comprising an aryl group covalently linked to an alkyl group, either of which may independently be optionally substituted or unsubstituted; and “heteroaryl” groups. As used herein, the term “heteroaryl” refers to groups having 5 to 14 ring atoms, preferably 5, 6, 9, or 10 ring atoms; having 6, 10, or 14a electrons shared in a cyclic array, and having, in addition to carbon atoms, one to about three heteroatoms selected from the group consisting of nitrogen (N), oxygen (O), and sulfur (S).

[0333] As employed herein, a “substituted” alkyl, cycloalkyl, aryl, heteroaryl, or heterocyclic group is one having one to about four, preferably one to about three, more preferably one or two, non-hydrogen substituents. Suitable substituents include, without limitation, halo, hydroxy, nitro, haloalkyl, alkyl, alkaryl, aryl, aralkyl, alkoxy, aryloxy, amino, acylamino, alkylcarbamoyl, arylcarbamoyl, aminoalkyl, alkoxycarbonyl, carboxy, hydroxyalkyl, alkanesulfonyl, arenesulfonyl, alkanesulfonamido, arenesulfonamido, aralkylsulfonamido, alkylcarbonyl, acyloxy, cyano, and ureido groups.

[0334] In some embodiments, the lipophilic moiety is an aralkyl group, e.g., a 2-arylpropanoyl moiety. The structural features of the aralkyl group are selected so that the lipophilic moiety will bind to at least one protein in vivo. In certain embodiments, the structural features of the aralkyl group are selected so that the lipophilic moiety binds to serum, vascular, or cellular proteins. In certain embodiments, the structural features of the aralkyl group promote binding to albumin, an immunoglobulin, a lipoprotein, α-2-macroglubulin, or α-1-glycoprotein.

[0335] In certain embodiments, the ligand is naproxen or a structural derivative of naproxen. Procedures for the synthesis of naproxen can be found in U.S. Pat. Nos. 3,904,682 and 4,009,197, which are hereby incorporated by reference in their entirety. Naproxen has the chemical name (S)-6-Methoxy-α-methyl-2-naphthaleneacetic acid and the structure is

[chemical structure]

[0336] In certain embodiments, the ligand is ibuprofen or a structural derivative of ibuprofen. Procedures for the synthesis of ibuprofen can be found in U.S. Pat. No. 3,228,831, which is incorporated herein by reference for the methods provided therein. The structure of ibuprofen is

[chemical structure]

[0337] Additional exemplary aralkyl groups are illustrated in U.S. Pat. No. 7,626,014, which is incorporated herein by reference for the methods provided therein.

[0338] In another embodiment, suitable lipophilic moieties include lipid, cholesterol, retinoic acid, cholic acid, adamantane acetic acid, 1-pyrene butyric acid, dihydrotestosterone, 1,3-bis-O(hexadecyl)glycerol, geranyloxyhexyanol, hexadecylglycerol, borneol, menthol, 1,3-propanediol, heptadecyl group, palmitic acid, myristic acid, O3-(oleoyl)lithocholic acid, O3-(oleoyl)cholenic acid, ibuprofen, naproxen, dimethoxytrityl, or phenoxazine.

[0339] In certain embodiments, more than one lipophilic moiety can be incorporated into the double-strand RNAi agent, particularly when the lipophilic moiety has a low lipophilicity or hydrophobicity. In some embodiments, two or more lipophilic moieties are incorporated into the same strand of the double-strand RNAi agent. In some embodiments, each strand of the double-strand RNAi agent has one or more lipophilic moieties incorporated. In some embodiments, two or more lipophilic moieties are incorporated into the same position (i.e., the same nucleobase, same sugar moiety, or same internucleosidic linkage) of the double-strand RNAi agent. This can be achieved by, e.g., conjugating the two or more lipophilic moieties via a carrier, or conjugating the two or more lipophilic moieties via a branched linker, or conjugating the two or more lipophilic moieties via one or more linkers, with one or more linkers linking the lipophilic moieties consecutively.

[0340] The lipophilic moiety may be conjugated to the RNAi agent via a direct attachment to the ribosugar of the RNAi agent. Alternatively, the lipophilic moiety may be conjugated to the double-strand RNAi agent via a linker or a carrier.

[0341] In certain embodiments, the lipophilic moiety may be conjugated to the RNAi agent via one or more linkers (tethers).

[0342] In some embodiments, the lipophilic moiety is conjugated to the double-stranded RNAi agent via a linker containing an ether, thioether, urea, carbonate, amine, amide, maleimide-thioether, disulfide, phosphodiester, sulfonamide linkage, a product of a click reaction (e.g., a triazole from the azide-alkyne cycloaddition), or carbamate.

### B. Lipid Conjugates

[0343] In some embodiments, the ligand is a lipid or lipid-based molecule. Such a lipid or lipid-based molecule can typically bind a serum protein, such as human serum albumin (HSA). An HSA binding ligand allows for vascular distribution of the conjugate to a target tissue. For example, the target tissue can be the eye. Other molecules that can bind HSA can also be used as ligands. For example, neproxin or aspirin can be used. A lipid or lipid-based ligand can (a) increase resistance to degradation of the conjugate, (b) increase targeting or transport into a target cell or cell membrane, and/or (c) can be used to adjust binding to a serum protein, e.g., HSA.

[0344] A lipid-based ligand can be used to modulate, e.g., control (e.g., inhibit) the binding of the conjugate to a target tissue. For example, a lipid or lipid-based ligand that binds to HSA more strongly will be less likely to be targeted to the kidney and therefore less likely to be cleared from the body. A lipid or lipid-based ligand that binds to HSA less strongly can be used to target the conjugate to the kidney.

[0345] In some embodiments, the lipid-based ligand binds HSA. For example, the ligand can bind HSA with a sufficient affinity such that distribution of the conjugate to a non-kidney tissue is enhanced. However, the affinity is typically not so strong that the HSA-ligand binding cannot be reversed.

[0346] In some embodiments, the lipid-based ligand binds HSA weakly or not at all, such that distribution of the conjugate to the kidney is enhanced. Other moieties that target to kidney cells can also be used in place of or in addition to the lipid-based ligand.

[0347] In another aspect, the ligand is a moiety, e.g., a vitamin, which is taken up by a target cell, e.g., a proliferating cell. These are particularly useful for treating disorders characterized by unwanted cell proliferation, e.g., of the malignant or non-malignant type, e.g., cancer cells Exemplary vitamins include vitamin A, E, and K. Other exemplary vitamins include B vitamin, e.g., folic acid, B12, riboflavin, biotin, pyridoxal or other vitamins or nutrients taken up by cancer cells. Also included are HSA and low-density lipoprotein (LDL).

### C. Cell Permeation Agents

[0348] In another aspect, the ligand is a cell-permeation agent, such as a helical cell-permeation agent. In some embodiments, the agent is amphipathic. An exemplary agent is a peptide such as tat or antennopedia. If the agent is a peptide, it can be modified, including a peptidylmimetic, invertomers, non-peptide or pseudo-peptide linkages, and use of D-amino acids. The helical agent is typically an α-helical agent, and can have a lipophilic and a lipophobic phase.

[0349] The ligand can be a peptide or peptidomimetic. A peptidomimetic (also referred to herein as an oligopeptidomimetic) is a molecule capable of folding into a defined three-dimensional structure similar to a natural peptide. The attachment of peptide and peptidomimetics to iRNA agents can affect pharmacokinetic distribution of the iRNA, such as by enhancing cellular recognition and absorption. The peptide or peptidomimetic moiety can be about 5-50 amino acids long, e.g., about 5, 10, 15, 20, 25, 30, 35, 40, 45, or 50 amino acids long.

[0350] A peptide or peptidomimetic can be, for example, a cell permeation peptide, cationic peptide, amphipathic peptide, or hydrophobic peptide (e.g., consisting primarily of Tyr, Trp or Phe). The peptide moiety can be a dendrimer peptide, constrained peptide or crosslinked peptide. In another alternative, the peptide moiety can include a hydrophobic membrane translocation sequence (MTS). An exemplary hydrophobic MTS-containing peptide is RFGF having the amino acid sequence AAVALLPAVLLALLAP (SEQ ID NO: 3). An RFGF analogue (e.g., amino acid sequence AALLPVLLAAP (SEQ ID NO: 4)) containing a hydrophobic MTS can also be a targeting moiety. The peptide moiety can be a “delivery” peptide, which can carry large polar molecules including peptides, oligonucleotides, and protein across cell membranes. For example, sequences from the HIV Tat protein (GRKKRRQRRRPPQ (SEQ ID NO: 5)) and the Drosophila Antennapedia protein (RQIKIWFQNRRMKWKK (SEQ ID NO: 6)) have been found to be capable of functioning as delivery peptides. A peptide or peptidomimetic can be encoded by a random sequence of DNA, such as a peptide identified from a phage-display library, or one-bead-one-compound (OBOC) combinatorial library (Lam et al., Nature, 354:82-84, 1991). Typically, the peptide or peptidomimetic tethered to a dsRNA agent via an incorporated monomer unit is a cell targeting peptide such as an arginine-glycine-aspartic acid (RGD)-peptide, or RGD mimic. A peptide moiety can range in length from about 5 amino acids to about 40 amino acids. The peptide moieties can have a structural modification, such as to increase stability or direct conformational properties. Any of the structural modifications described below can be utilized.

[0351] An RGD peptide for use in the compositions and methods of the disclosure may be linear or cyclic, and may be modified, e.g., glycosylated or methylated, to facilitate targeting to a specific tissue(s). RGD-containing peptides and peptidomimetics may include D-amino acids, as well as synthetic RGD mimics. In addition to RGD, one can use other moieties that target the integrin ligand. In some embodiments, conjugates of this ligand target PECAM-1 or VEGF.

[0352] An RGD peptide moiety can be used to target a particular cell type, e.g., an ocular cell, a tumor cell, such as an endothelial tumor cell or a breast cancer tumor cell (Zitzmann et al., Cancer Res., 62:5139-43, 2002). An RGD peptide can facilitate targeting of an dsRNA agent to tumors of a variety of other tissues, including the lung, kidney, spleen, or liver (Aoki et al., Cancer Gene Therapy 8:783-787, 2001). Typically, the RGD peptide will facilitate targeting of an iRNA agent to the eye or kidney. The RGD peptide can be linear or cyclic, and can be modified, e.g., glycosylated or methylated to facilitate targeting to specific tissues. For example, a glycosylated RGD peptide can deliver a iRNA agent to a tumor cell expressing α_{V}β₃ (Haubner et al., Jour. Nucl. Med, 42:326-336, 2001).

[0353] A “cell permeation peptide” is capable of permeating a cell, e.g., a microbial cell, such as a bacterial or fungal cell, or a mammalian cell, such as a human cell. A microbial cell-permeating peptide can be, for example, an α-helical linear peptide (e.g., LL-37 or Ceropin P1), a disulfide bond-containing peptide (e.g., α-defensin, β-defensin or bactenecin), or a peptide containing only one or two dominating amino acids (e.g., PR-39 or indolicidin). A cell permeation peptide can also include a nuclear localization signal (NLS). For example, a cell permeation peptide can be a bipartite amphipathic peptide, such as MPG, which is derived from the fusion peptide domain of HIV-1 gp41 and the NLS of SV40 large T antigen (Simeoni et al., Nucl. Acids Res. 31:2717-2724, 2003).

### D. Carbohydrate Conjugates and Ligands

[0354] In some embodiments of the compositions and methods of the disclosure, an iRNA oligonucleotide further comprises a carbohydrate. The carbohydrate conjugated iRNA are advantageous for the in vivo delivery of nucleic acids, as well as compositions suitable for in vivo therapeutic use, as described herein. As used herein, “carbohydrate” refers to a compound which is either a carbohydrate per se made up of one or more monosaccharide units having at least 6 carbon atoms (which can be linear, branched or cyclic) with an oxygen, nitrogen or sulfur atom bonded to each carbon atom; or a compound having as a part thereof a carbohydrate moiety made up of one or more monosaccharide units each having at least six carbon atoms (which can be linear, branched or cyclic), with an oxygen, nitrogen or sulfur atom bonded to each carbon atom. Representative carbohydrates include the sugars (mono-, di-, tri- and oligosaccharides containing from about 4, 5, 6, 7, 8, or 9 monosaccharide units), and polysaccharides such as starches, glycogen, cellulose and polysaccharide gums. Specific monosaccharides include C5 and above (e.g., C5, C6, C7, or C8) sugars; di- and trisaccharides include sugars having two or three monosaccharide units (e.g., C5, C6, C7, or C8).

[0355] In certain embodiments, the compositions and methods of the disclosure include a C16 ligand. In exemplary embodiments, the C16 ligand of the disclosure has the following structure (exemplified here below for a uracil base, yet attachment of the C16 ligand is contemplated for a nucleotide presenting any base (C, G, A, etc.) or possessing any other modification as presented herein, provided that 2′ ribo attachment is preserved) and is attached at the 2′ position of the ribo within a residue that is so modified:

[chemical structure]

[0356] As shown above, a C16 ligand-modified residue presents a straight chain alkyl at the 2′-ribo position of an exemplary residue (here, a Uracil) that is so modified.

[0357] In some embodiments, a carbohydrate conjugate of a RNAi agent of the instant disclosure further comprises one or more additional ligands as described above, such as, but not limited to, a PK modulator or a cell permeation peptide.

[0358] Additional carbohydrate conjugates (and linkers) suitable for use in the present disclosure include those described in WO 2014/179620 and WO 2014/179627, the entire contents of each of which are incorporated herein by reference.

[0359] In certain embodiments, the compositions and methods of the disclosure include a vinyl phosponate (VP) modification of an RNAi agent as described herein. In exemplary embodiments, a vinyl phosphonate of the disclosure has the following structure.

[chemical structure]

[0360] A vinyl phosponate of the instant disclosure may be attached to either the antisense or the sense strand of a dsRNA of the disclosure. In certain embodiments, a vinyl phosphonate of the instant disclosure is attached to the antisense strand of a dsRNA, optionally at the 5′ end of the antisense strand of the dsRNA. The dsRNA agent can comprise a phosphorus-containing group at the 5′-end of the sense strand or antisense strand. The 5′-end phosphorus-containing group can be 5′-end phosphate (5′-P), 5′-end phosphorothioate (5′-PS), 5′-end phosphorodithioate (5′-PS2), 5′-end vinylphosphonate (5′-VP), 5′-end methylphosphonate (MePhos), or 5′-deoxy-5′-C-malonyl. When the 5′-end phosphorus-containing group is 5′-end vinylphosphonate (5′-VP), the 5′-VP can be either 5′-E-VP isomer (i.e., trans-vinylphosphonate,

[chemical structure]

5′-Z-VP isomer (i.e., cis-vinylphosphonate,

[chemical structure]

or mixtures thereof.

[0361] Vinyl phosphate modifications are also contemplated for the compositions and methods of the instant disclosure. An exemplary vinyl phosphate structure is:

[chemical structure]

[0362] In some embodiments, a carbohydrate conjugate comprises a monosaccharide. In some embodiments, the monosaccharide is an N-acetylgalactosamine (GalNAc). GalNAc conjugates, which comprise one or more N-acetylgalactosamine (GalNAc) derivatives, are described, for example, in U.S. Pat. No. 8,106,022, the entire content of which is hereby incorporated herein by reference. In some embodiments, the GalNAc conjugate serves as a ligand that targets the iRNA to particular cells. In some embodiments, the GalNAc conjugate targets the iRNA to liver cells, e.g., by serving as a ligand for the asialoglycoprotein receptor of liver cells (e.g., hepatocytes).

[0363] In some embodiments, the carbohydrate conjugate comprises one or more GalNAc derivatives. The GalNAc derivatives may be attached via a linker, e.g., a bivalent or trivalent branched linker. In some embodiments the GalNAc conjugate is conjugated to the 3′ end of the sense strand. In some embodiments, the GalNAc conjugate is conjugated to the iRNA agent (e.g., to the 3′ end of the sense strand) via a linker, e.g., a linker as described herein.

[0364] In some embodiments, the GalNAc conjugate is

[chemical structure]

[0365] In some embodiments, the RNAi agent is attached to the carbohydrate conjugate via a linker as shown in the following schematic, wherein X is O or S:

[chemical structure]

[0366] In some embodiments, the RNAi agent is conjugated to L96 as defined in Table 2 and shown below:

[chemical structure]

[0367] In some embodiments, a carbohydrate conjugate for use in the compositions and methods of the disclosure is selected from the group consisting of:

[chemical structure]

[chemical structure]

[chemical structure]

[chemical structure]

[chemical structure]

[0368] Another representative carbohydrate conjugate for use in the embodiments described herein includes, but is not limited to,

[chemical structure]

when one of X or Y is an oligonucleotide, the other is a hydrogen.

[0369] In some embodiments, the carbohydrate conjugate further comprises one or more additional ligands as described above, such as, but not limited to, a PK modulator and/or a cell permeation peptide.

[0370] In some embodiments, an iRNA of the disclosure is conjugated to a carbohydrate through a linker. Non-limiting examples of iRNA carbohydrate conjugates with linkers of the compositions and methods of the disclosure include, but are not limited to,

[chemical structure]

[chemical structure]

when one of X or Y is an oligonucleotide, the other is a hydrogen.

### E. Thermally Destabilizing Modifications

[0371] In certain embodiments, a dsRNA molecule can be optimized for RNA interference by incorporating thermally destabilizing modifications in the seed region of the antisense strand (i.e., at positions 2-9 of the 5′-end of the antisense strand) to reduce or inhibit off-target gene silencing. It has been discovered that dsRNAs with an antisense strand comprising at least one thermally destabilizing modification of the duplex within the first 9 nucleotide positions, counting from the 5′ end, of the antisense strand have reduced off-target gene silencing activity. Accordingly, in some embodiments, the antisense strand comprises at least one (e.g., one, two, three, four, five, or more) thermally destabilizing modification of the duplex within the first 9 nucleotide positions of the 5′ region of the antisense strand. In some embodiments, one or more thermally destabilizing modification(s) of the duplex is/are located in positions 2-9, or positions 4-8, from the 5′-end of the antisense strand. In some further embodiments, the thermally destabilizing modification(s) of the duplex is/are located at position 6, 7, or 8 from the 5′-end of the antisense strand. In still some further embodiments, the thermally destabilizing modification of the duplex is located at position 7 from the 5′-end of the antisense strand. The term “thermally destabilizing modification(s)” includes modification(s) that would result with a dsRNA with a lower overall melting temperature (Tm), such as a Tm with one, two, three, or four degrees lower than the Tm of the dsRNA without having such modification(s). In some embodiments, the thermally destabilizing modification of the duplex is located at position 2, 3, 4, 5, or 9 from the 5′-end of the antisense strand.

[0372] The thermally destabilizing modifications can include, but are not limited to, abasic modification; mismatch with the opposing nucleotide in the opposing strand; and sugar modification such as 2′-deoxy modification or acyclic nucleotide, e.g., unlocked nucleic acids (UNA) or glycol nucleic acid (GNA).

[0373] Exemplified abasic modifications include, but are not limited to, the following:

[chemical structure]

### Wherein R═H, Me, Et or OMe; R′═H, Me, Et or OMe; R″═H, Me, Et or OMe

[chemical structure]

wherein B is a modified or unmodified nucleobase.

[0375] Exemplified sugar modifications include, but are not limited to the following:

[chemical structure]

wherein B is a modified or unmodified nucleobase.

[0376] In some embodiments the thermally destabilizing modification of the duplex is selected from the group consisting of:

[chemical structure]

wherein B is a modified or unmodified nucleobase and the asterisk on each structure represents either R, S or racemic.

[0377] The term “acyclic nucleotide” refers to any nucleotide having an acyclic ribose sugar, for example, where any of bonds between the ribose carbons (e.g., C1′-C2′, C2′-C3′, C3′-C4′, C4′-O4′, or C1′-O4′) is absent or at least one of ribose carbons or oxygen (e.g, C1′, C2′, C3′, C4′, or O4′) are independently or in combination absent from the nucleotide. In some embodiments, acyclic nucleotide is

[chemical structure]

wherein B is a modified or unmodified nucleobase, R¹ and R² independently are H, halogen, OR₃, or alkyl; and R₃ is H, alkyl, cycloalkyl, aryl, aralkyl, heteroaryl or sugar). The term “UNA” refers to unlocked acyclic nucleic acid, wherein any of the bonds of the sugar has been removed, forming an unlocked “sugar” residue. In one example, UNA also encompasses monomers with bonds between C1′-C4′ being removed (i.e. the covalent carbon-oxygen-carbon bond between the C1′ and C4′ carbons). In another example, the C2′-C3′ bond (i.e. the covalent carbon-carbon bond between the C2′ and C3′ carbons) of the sugar is removed (see Mikhailov et. al., Tetrahedron Letters, 26 (17): 2059 (1985); and Fluiter et al., Mol. Biosyst., 10: 1039 (2009), which are hereby incorporated by reference in their entirety). The acyclic derivative provides greater backbone flexibility without affecting the Watson-Crick pairings. The acyclic nucleotide can be linked via 2′-5′ or 3′-5′ linkage.

[0378] The term ‘GNA’ refers to glycol nucleic acid which is a polymer similar to DNA or RNA but differing in the composition of its “backbone” in that is composed of repeating glycerol units linked by phosphodiester bonds:

[chemical structure]

[0379] The thermally destabilizing modification of the duplex can be mismatches (i.e., noncomplementary base pairs) between the thermally destabilizing nucleotide and the opposing nucleotide in the opposite strand within the dsRNA duplex. Exemplary mismatch base pairs include G:G, G:A, G:U, G:T, A:A, A:C, C:C, C:U, C:T, U:U, T:T, U:T, or a combination thereof. Other mismatch base pairings known in the art are also amenable to the present invention. A mismatch can occur between nucleotides that are either naturally occurring nucleotides or modified nucleotides, i.e., the mismatch base pairing can occur between the nucleobases from respective nucleotides independent of the modifications on the ribose sugars of the nucleotides. In certain embodiments, the dsRNA molecule contains at least one nucleobase in the mismatch pairing that is a 2′-deoxy nucleobase; e.g., the 2′-deoxy nucleobase is in the sense strand.

[0380] In some embodiments, the thermally destabilizing modification of the duplex in the seed region of the antisense strand includes nucleotides with impaired W—C H-bonding to complementary base on the target mRNA, such as:

[chemical structure]

[0381] More examples of abasic nucleotide, acyclic nucleotide modifications (including UNA and GNA), and mismatch modifications have been described in detail in WO 2011/133876, which is herein incorporated by reference in its entirety.

[0382] The thermally destabilizing modifications may also include universal base with reduced or abolished capability to form hydrogen bonds with the opposing bases, and phosphate modifications.

[0383] In some embodiments, the thermally destabilizing modification of the duplex includes nucleotides with non-canonical bases such as, but not limited to, nucleobase modifications with impaired or completely abolished capability to form hydrogen bonds with bases in the opposite strand. These nucleobase modifications have been evaluated for destabilization of the central region of the dsRNA duplex as described in WO 2010/0011895, which is herein incorporated by reference in its entirety. Exemplary nucleobase modifications are:

[chemical structure]

[0384] In some embodiments, the thermally destabilizing modification of the duplex in the seed region of the antisense strand includes one or more α-nucleotide complementary to the base on the target mRNA, such as:

[chemical structure]

wherein R is H, OH, OCH₃, F, NH₂, NHMe, NMe₂ or O-alkyl.

[0385] Exemplary phosphate modifications known to decrease the thermal stability of dsRNA duplexes compared to natural phosphodiester linkages are:

[chemical structure]

[0386] The alkyl for the R group can be a C₁-C₆alkyl. Specific alkyls for the R group include, but are not limited to methyl, ethyl, propyl, isopropyl, butyl, pentyl and hexyl.

[0387] As the skilled artisan will recognize, in view of the functional role of nucleobases is defining specificity of a RNAi agent of the disclosure, while nucleobase modifications can be performed in the various manners as described herein, e.g., to introduce destabilizing modifications into a RNAi agent of the disclosure, e.g., for purpose of enhancing on-target effect relative to off-target effect, the range of modifications available and, in general, present upon RNAi agents of the disclosure tends to be much greater for non-nucleobase modifications, e.g., modifications to sugar groups or phosphate backbones of polyribonucleotides. Such modifications are described in greater detail in other sections of the instant disclosure and are expressly contemplated for RNAi agents of the disclosure, either possessing native nucleobases or modified nucleobases as described above or elsewhere herein.

[0388] In addition to the antisense strand comprising a thermally destabilizing modification, the dsRNA can also comprise one or more stabilizing modifications. For example, the dsRNA can comprise at least two (e.g., two, three, four, five, six, seven, eight, nine, ten, or more) stabilizing modifications. Without limitations, the stabilizing modifications all can be present in one strand. In some embodiments, both the sense and the antisense strands comprise at least two stabilizing modifications. The stabilizing modification can occur on any nucleotide of the sense strand or antisense strand. For instance, the stabilizing modification can occur on every nucleotide on the sense strand or antisense strand; each stabilizing modification can occur in an alternating pattern on the sense strand or antisense strand; or the sense strand or antisense strand comprises both stabilizing modification in an alternating pattern. The alternating pattern of the stabilizing modifications on the sense strand may be the same or different from the antisense strand, and the alternating pattern of the stabilizing modifications on the sense strand can have a shift relative to the alternating pattern of the stabilizing modifications on the antisense strand.

[0389] In some embodiments, the antisense strand comprises at least two (e.g., two, three, four, five, six, seven, eight, nine, ten, or more) stabilizing modifications. Without limitations, a stabilizing modification in the antisense strand can be present at any positions.

[0390] In some embodiments, the antisense strand comprises stabilizing modifications at positions 2, 6, 8, 9, 14, and 16 from the 5′-end. In some other embodiments, the antisense strand comprises stabilizing modifications at positions 2, 6, 14, and 16 from the 5′-end. In still some other embodiments, the antisense strand comprises stabilizing modifications at positions 2, 14, and 16 from the 5′-end.

[0391] In some embodiments, the antisense strand comprises at least one stabilizing modification adjacent to the destabilizing modification. For example, the stabilizing modification can be the nucleotide at the 5′-end or the 3′-end of the destabilizing modification, i.e., at position −1 or +1 from the position of the destabilizing modification. In some embodiments, the antisense strand comprises a stabilizing modification at each of the 5′-end and the 3′-end of the destabilizing modification, i.e., positions −1 and +1 from the position of the destabilizing modification.

[0392] In some embodiments, the antisense strand comprises at least two stabilizing modifications at the 3′-end of the destabilizing modification, i.e., at positions +1 and +2 from the position of the destabilizing modification.

[0393] In some embodiments, the sense strand comprises at least two (e.g., two, three, four, five, six, seven, eight, nine, ten or more) stabilizing modifications. Without limitations, a stabilizing modification in the sense strand can be present at any positions. In some embodiments, the sense strand comprises stabilizing modifications at positions 7, 10, and 11 from the 5′-end. In some other embodiments, the sense strand comprises stabilizing modifications at positions 7, 9, 10, and 11 from the 5′-end. In some embodiments, the sense strand comprises stabilizing modifications at positions opposite or complimentary to positions 11, 12, and 15 of the antisense strand, counting from the 5′-end of the antisense strand. In some other embodiments, the sense strand comprises stabilizing modifications at positions opposite or complimentary to positions 11, 12, 13, and 15 of the antisense strand, counting from the 5′-end of the antisense strand. In some embodiments, the sense strand comprises a block of two, three, or four stabilizing modifications.

[0394] In some embodiments, the sense strand does not comprise a stabilizing modification in position opposite or complimentary to the thermally destabilizing modification of the duplex in the antisense strand.

[0395] Exemplary thermally stabilizing modifications include, but are not limited to, 2′-fluoro modifications. Other thermally stabilizing modifications include, but are not limited to, LNA.

[0396] In some embodiments, the dsRNA of the disclosure comprises at least four (e.g., four, five, six, seven, eight, nine, ten, or more) 2′-fluoro nucleotides. Without limitations, the 2′-fluoro nucleotides all can be present in one strand. In some embodiments, both the sense and the antisense strands comprise at least two 2′-fluoro nucleotides. The 2′-fluoro modification can occur on any nucleotide of the sense strand or antisense strand. For instance, the 2′-fluoro modification can occur on every nucleotide on the sense strand or antisense strand; each 2′-fluoro modification can occur in an alternating pattern on the sense strand or antisense strand; or the sense strand or antisense strand comprises both 2′-fluoro modifications in an alternating pattern. The alternating pattern of the 2′-fluoro modifications on the sense strand may be the same or different from the antisense strand, and the alternating pattern of the 2′-fluoro modifications on the sense strand can have a shift relative to the alternating pattern of the 2′-fluoro modifications on the antisense strand.

[0397] In some embodiments, the antisense strand comprises at least two (e.g., two, three, four, five, six, seven, eight, nine, ten, or more) 2′-fluoro nucleotides. Without limitations, a 2′-fluoro modification in the antisense strand can be present at any positions. In some embodiments, the antisense comprises 2′-fluoro nucleotides at positions 2, 6, 8, 9, 14, and 16 from the 5′-end. In some other embodiments, the antisense comprises 2′-fluoro nucleotides at positions 2, 6, 14, and 16 from the 5′-end. In still some other embodiments, the antisense comprises 2′-fluoro nucleotides at positions 2, 14, and 16 from the 5′-end.

[0398] In some embodiments, the antisense strand comprises at least one 2′-fluoro nucleotide adjacent to the destabilizing modification. For example, the 2′-fluoro nucleotide can be the nucleotide at the 5′-end or the 3′-end of the destabilizing modification, i.e., at position −1 or +1 from the position of the destabilizing modification. In some embodiments, the antisense strand comprises a 2′-fluoro nucleotide at each of the 5′-end and the 3′-end of the destabilizing modification, i.e., positions −1 and +1 from the position of the destabilizing modification.

[0399] In some embodiments, the antisense strand comprises at least two 2′-fluoro nucleotides at the 3′-end of the destabilizing modification, i.e., at positions +1 and +2 from the position of the destabilizing modification.

[0400] In some embodiments, the sense strand comprises at least two (e.g., two, three, four, five, six, seven, eight, nine, ten, or more) 2′-fluoro nucleotides. Without limitations, a 2′-fluoro modification in the sense strand can be present at any positions. In some embodiments, the antisense comprises 2′-fluoro nucleotides at positions 7, 10, and 11 from the 5′-end. In some other embodiments, the sense strand comprises 2′-fluoro nucleotides at positions 7, 9, 10, and 11 from the 5′-end. In some embodiments, the sense strand comprises 2′-fluoro nucleotides at positions opposite or complimentary to positions 11, 12, and 15 of the antisense strand, counting from the 5′-end of the antisense strand. In some other embodiments, the sense strand comprises 2′-fluoro nucleotides at positions opposite or complimentary to positions 11, 12, 13, and 15 of the antisense strand, counting from the 5′-end of the antisense strand. In some embodiments, the sense strand comprises a block of two, three, or four 2′-fluoro nucleotides.

[0401] In some embodiments, the sense strand does not comprise a 2′-fluoro nucleotide in position opposite or complimentary to the thermally destabilizing modification of the duplex in the antisense strand.

[0402] In some embodiments, the dsRNA molecule of the disclosure comprises a 21 nucleotides (nt) sense strand and a 23 nucleotides (nt) antisense, wherein the antisense strand contains at least one thermally destabilizing nucleotide, where the at least one thermally destabilizing nucleotide occurs in the seed region of the antisense strand (i.e., at position 2-9 of the 5′-end of the antisense strand), wherein one end of the dsRNA is blunt, while the other end is comprises a 2 nt overhang, and wherein the dsRNA optionally further has at least one (e.g., one, two, three, four, five, six, or all seven) of the following characteristics: (i) the antisense comprises 2, 3, 4, 5, or 6 2′-fluoro modifications; (ii) the antisense comprises 1, 2, 3, 4, or 5 phosphorothioate internucleotide linkages; (iii) the sense strand is conjugated with a ligand; (iv) the sense strand comprises 2, 3, 4, or 5 2′-fluoro modifications; (v) the sense strand comprises 1, 2, 3, 4, or 5 phosphorothioate internucleotide linkages; (vi) the dsRNA comprises at least four 2′-fluoro modifications; and (vii) the dsRNA comprises a blunt end at 5′-end of the antisense strand. In certain embodiments, the 2 nt overhang is at the 3′-end of the antisense strand.

[0403] In some embodiments, every nucleotide in the sense strand and antisense strand of the dsRNA molecule may be modified. Each nucleotide may be modified with the same or different modification which can include one or more alteration of one or both of the non-linking phosphate oxygens or of one or more of the linking phosphate oxygens; alteration of a constituent of the ribose sugar, e.g., of the 2′ hydroxyl on the ribose sugar; wholesale replacement of the phosphate moiety with “dephospho” linkers; modification or replacement of a naturally occurring base; and replacement or modification of the ribose-phosphate backbone.

[0404] As nucleic acids are polymers of subunits, many of the modifications occur at a position which is repeated within a nucleic acid, e.g., a modification of a base, or a phosphate moiety, or a non-linking O of a phosphate moiety. In some cases, the modification will occur at all of the subject positions in the nucleic acid but in many cases it will not. By way of example, a modification may only occur at a 3′ or 5′ terminal position, may only occur in a terminal region, e.g., at a position on a terminal nucleotide or in the last 2, 3, 4, 5, or 10 nucleotides of a strand. A modification may occur in a double strand region, a single strand region, or in both. A modification may occur only in the double strand region of an RNA or may only occur in a single strand region of an RNA. E.g., a phosphorothioate modification at a non-linking O position may only occur at one or both termini, may only occur in a terminal region, e.g., at a position on a terminal nucleotide or in the last 2, 3, 4, 5, or 10 nucleotides of a strand, or may occur in double strand and single strand regions, particularly at termini. The 5′ end or ends can be phosphorylated.

[0405] It may be possible, e.g., to enhance stability, to include particular bases in overhangs, or to include modified nucleotides or nucleotide surrogates, in single strand overhangs, e.g., in a 5′ or 3′ overhang, or in both. E.g., it can be desirable to include purine nucleotides in overhangs. In some embodiments all or some of the bases in a 3′ or 5′ overhang may be modified, e.g., with a modification described herein. Modifications can include, e.g., the use of modifications at the 2′ position of the ribose sugar with modifications that are known in the art, e.g., the use of deoxyribonucleotides, 2′-deoxy-2′-fluoro (2′-F) or 2′-O-methyl modified instead of the ribosugar of the nucleobase, and modifications in the phosphate group, e.g., phosphorothioate modifications. Overhangs need not be homologous with the target sequence.

[0406] In some embodiments, each residue of the sense strand and antisense strand is independently modified with LNA, HNA, CeNA, 2′-methoxyethyl, 2′-O-methyl, 2′-O-allyl, 2′-C-allyl, 2′-deoxy, or 2′-fluoro. The strands can contain more than one modification. In some embodiments, each residue of the sense strand and antisense strand is independently modified with 2′-O-methyl or 2′-fluoro. It is to be understood that these modifications are in addition to the at least one thermally destabilizing modification of the duplex present in the antisense strand.

[0407] At least two different modifications are typically present on the sense strand and antisense strand. Those two modifications may be the 2′-deoxy, 2′-O-methyl, or 2′-fluoro modifications, acyclic nucleotides or others. In some embodiments, the sense strand and antisense strand each comprises two differently modified nucleotides selected from 2′-O-methyl or 2′-deoxy. In some embodiments, each residue of the sense strand and antisense strand is independently modified with 2′-O-methyl nucleotide, 2′-deoxy nucleotide, 2′-deoxy-2′-fluoro nucleotide, 2′-O—N-methylacetamido (2′-O-NMA) nucleotide, a 2′-O-dimethylaminoethoxyethyl (2′-O-DMAEOE) nucleotide, 2′-O-aminopropyl (2′-O-AP) nucleotide, or 2′-ara-F nucleotide. Again, it is to be understood that these modifications are in addition to the at least one thermally destabilizing modification of the duplex present in the antisense strand.

[0408] In some embodiments, the dsRNA molecule of the disclosure comprises modifications of an alternating pattern, particular in the B1, B2, B3, B1′, B2′, B3′, B4′ regions. The term “alternating motif” or “alternative pattern” as used herein refers to a motif having one or more modifications, each modification occurring on alternating nucleotides of one strand. The alternating nucleotide may refer to one per every other nucleotide or one per every three nucleotides, or a similar pattern. For example, if A, B and C each represent one type of modification to the nucleotide, the alternating motif can be “ABABABABABAB . . . ,” “AABBAABBAABB . . . ,” “AABAABAABAAB . . . ,” “AAABAAABAAAB . . . ,” “AAABBBAAABBB . . . ,” or “ABCABCABCABC . . . ,” etc.

[0409] The type of modifications contained in the alternating motif may be the same or different. For example, if A, B, C, D each represent one type of modification on the nucleotide, the alternating pattern, i.e., modifications on every other nucleotide, may be the same, but each of the sense strand or antisense strand can be selected from several possibilities of modifications within the alternating motif such as “ABABAB . . . ”, “ACACAC . . . ” “BDBDBD . . . ” or “CDCDCD . . . ,” etc.

[0410] In some embodiments, the dsRNA molecule of the disclosure comprises the modification pattern for the alternating motif on the sense strand relative to the modification pattern for the alternating motif on the antisense strand is shifted. The shift may be such that the modified group of nucleotides of the sense strand corresponds to a differently modified group of nucleotides of the antisense strand and vice versa. For example, the sense strand when paired with the antisense strand in the dsRNA duplex, the alternating motif in the sense strand may start with “ABABAB” from 5′-3′ of the strand and the alternating motif in the antisense strand may start with “BABABA” from 3′-5′ of the strand within the duplex region. As another example, the alternating motif in the sense strand may start with “AABBAABB” from 5′-3′ of the strand and the alternating motif in the antisense strand may start with “BBAABBAA” from 3′-5′ of the strand within the duplex region, so that there is a complete or partial shift of the modification patterns between the sense strand and the antisense strand.

[0411] The dsRNA molecule of the disclosure may further comprise at least one phosphorothioate or methylphosphonate internucleotide linkage. The phosphorothioate or methylphosphonate internucleotide linkage modification may occur on any nucleotide of the sense strand or antisense strand or both in any position of the strand. For instance, the internucleotide linkage modification may occur on every nucleotide on the sense strand or antisense strand; each internucleotide linkage modification may occur in an alternating pattern on the sense strand or antisense strand; or the sense strand or antisense strand comprises both internucleotide linkage modifications in an alternating pattern. The alternating pattern of the internucleotide linkage modification on the sense strand may be the same or different from the antisense strand, and the alternating pattern of the internucleotide linkage modification on the sense strand may have a shift relative to the alternating pattern of the internucleotide linkage modification on the antisense strand.

[0412] In some embodiments, the dsRNA molecule comprises the phosphorothioate or methylphosphonate internucleotide linkage modification in the overhang region. For example, the overhang region comprises two nucleotides having a phosphorothioate or methylphosphonate internucleotide linkage between the two nucleotides. Internucleotide linkage modifications also may be made to link the overhang nucleotides with the terminal paired nucleotides within duplex region. For example, at least 2, 3, 4, or all the overhang nucleotides may be linked through phosphorothioate or methylphosphonate internucleotide linkage, and optionally, there may be additional phosphorothioate or methylphosphonate internucleotide linkages linking the overhang nucleotide with a paired nucleotide that is next to the overhang nucleotide. For instance, there may be at least two phosphorothioate internucleotide linkages between the terminal three nucleotides, in which two of the three nucleotides are overhang nucleotides, and the third is a paired nucleotide next to the overhang nucleotide. In certain embodiments, these terminal three nucleotides may be at the 3′-end of the antisense strand.

[0413] In some embodiments, the sense strand of the dsRNA molecule comprises 1-10 blocks of two to ten phosphorothioate or methylphosphonate internucleotide linkages separated by 1, 2, 3, 4, 5, 6, 7, 8, 9, 10, 11, 12, 13, 14, 15, or 16 phosphate internucleotide linkages, wherein one of the phosphorothioate or methylphosphonate internucleotide linkages is placed at any position in the oligonucleotide sequence and the said sense strand is paired with an antisense strand comprising any combination of phosphorothioate, methylphosphonate, and phosphate internucleotide linkages or an antisense strand comprising either phosphorothioate or methylphosphonate or phosphate linkage.

[0414] In some embodiments, the antisense strand of the dsRNA molecule comprises two blocks of two phosphorothioate or methylphosphonate internucleotide linkages separated by 1, 2, 3, 4, 5, 6, 7, 8, 9, 10, 11, 12, 13, 14, 15, 16, 17, or 18 phosphate internucleotide linkages, wherein one of the phosphorothioate or methylphosphonate internucleotide linkages is placed at any position in the oligonucleotide sequence and the said antisense strand is paired with a sense strand comprising any combination of phosphorothioate, methylphosphonate, and phosphate internucleotide linkages or an antisense strand comprising either phosphorothioate or methylphosphonate or phosphate linkage.

[0415] In some embodiments, the antisense strand of the dsRNA molecule comprises two blocks of three phosphorothioate or methylphosphonate internucleotide linkages separated by 1, 2, 3, 4, 5, 6, 7, 8, 9, 10, 11, 12, 13, 14, 15, or 16 phosphate internucleotide linkages, wherein one of the phosphorothioate or methylphosphonate internucleotide linkages is placed at any position in the oligonucleotide sequence and the said antisense strand is paired with a sense strand comprising any combination of phosphorothioate, methylphosphonate, and phosphate internucleotide linkages or an antisense strand comprising either phosphorothioate or methylphosphonate or phosphate linkage.

[0416] In some embodiments, the antisense strand of the dsRNA molecule comprises two blocks of four phosphorothioate or methylphosphonate internucleotide linkages separated by 1, 2, 3, 4, 5, 6, 7, 8, 9, 10, 11, 12, 13, or 14 phosphate internucleotide linkages, wherein one of the phosphorothioate or methylphosphonate internucleotide linkages is placed at any position in the oligonucleotide sequence and the said antisense strand is paired with a sense strand comprising any combination of phosphorothioate, methylphosphonate, and phosphate internucleotide linkages or an antisense strand comprising either phosphorothioate or methylphosphonate or phosphate linkage.

[0417] In some embodiments, the antisense strand of the dsRNA molecule comprises two blocks of five phosphorothioate or methylphosphonate internucleotide linkages separated by 1, 2, 3, 4, 5, 6, 7, 8, 9, 10, 11, or 12 phosphate internucleotide linkages, wherein one of the phosphorothioate or methylphosphonate internucleotide linkages is placed at any position in the oligonucleotide sequence and the said antisense strand is paired with a sense strand comprising any combination of phosphorothioate, methylphosphonate, and phosphate internucleotide linkages or an antisense strand comprising either phosphorothioate or methylphosphonate or phosphate linkage.

[0418] In some embodiments, the antisense strand of the dsRNA molecule comprises two blocks of six phosphorothioate or methylphosphonate internucleotide linkages separated by 1, 2, 3, 4, 5, 6, 7, 8, 9, or 10 phosphate internucleotide linkages, wherein one of the phosphorothioate or methylphosphonate internucleotide linkages is placed at any position in the oligonucleotide sequence and the said antisense strand is paired with a sense strand comprising any combination of phosphorothioate, methylphosphonate, and phosphate internucleotide linkages or an antisense strand comprising either phosphorothioate or methylphosphonate or phosphate linkage.

[0419] In some embodiments, the antisense strand of the dsRNA molecule comprises two blocks of seven phosphorothioate or methylphosphonate internucleotide linkages separated by 1, 2, 3, 4, 5, 6, 7, or 8 phosphate internucleotide linkages, wherein one of the phosphorothioate or methylphosphonate internucleotide linkages is placed at any position in the oligonucleotide sequence and the said antisense strand is paired with a sense strand comprising any combination of phosphorothioate, methylphosphonate, and phosphate internucleotide linkages or an antisense strand comprising either phosphorothioate or methylphosphonate or phosphate linkage.

[0420] In some embodiments, the antisense strand of the dsRNA molecule comprises two blocks of eight phosphorothioate or methylphosphonate internucleotide linkages separated by 1, 2, 3, 4, 5, or 6 phosphate internucleotide linkages, wherein one of the phosphorothioate or methylphosphonate internucleotide linkages is placed at any position in the oligonucleotide sequence and the said antisense strand is paired with a sense strand comprising any combination of phosphorothioate, methylphosphonate, and phosphate internucleotide linkages or an antisense strand comprising either phosphorothioate or methylphosphonate or phosphate linkage.

[0421] In some embodiments, the antisense strand of the dsRNA molecule comprises two blocks of nine phosphorothioate or methylphosphonate internucleotide linkages separated by 1, 2, 3, or 4 phosphate internucleotide linkages, wherein one of the phosphorothioate or methylphosphonate internucleotide linkages is placed at any position in the oligonucleotide sequence and the said antisense strand is paired with a sense strand comprising any combination of phosphorothioate, methylphosphonate, and phosphate internucleotide linkages or an antisense strand comprising either phosphorothioate or methylphosphonate or phosphate linkage.

[0422] In some embodiments, the dsRNA molecule of the disclosure further comprises one or more phosphorothioate or methylphosphonate internucleotide linkage modification within positions 1-10 of the termini position(s) of the sense or antisense strand. For example, at least 2, 3, 4, 5, 6, 7, 8, 9, or 10 nucleotides may be linked through phosphorothioate or methylphosphonate internucleotide linkage at one end or both ends of the sense or antisense strand.

[0423] In some embodiments, the dsRNA molecule of the disclosure further comprises one or more phosphorothioate or methylphosphonate internucleotide linkage modification within positions 1-10 of the internal region of the duplex of each of the sense or antisense strand. For example, at least 2, 3, 4, 5, 6, 7, 8, 9, or 10 nucleotides may be linked through phosphorothioate methylphosphonate internucleotide linkage at position 8-16 of the duplex region counting from the 5′-end of the sense strand; the dsRNA molecule can optionally further comprise one or more phosphorothioate or methylphosphonate internucleotide linkage modification within positions 1-10 of the termini position(s).

[0424] In some embodiments, the dsRNA molecule of the disclosure further comprises one to five phosphorothioate or methylphosphonate internucleotide linkage modification(s) within position 1-5 and one to five phosphorothioate or methylphosphonate internucleotide linkage modification(s) within position 18-23 of the sense strand (counting from the 5′-end), and one to five phosphorothioate or methylphosphonate internucleotide linkage modification at positions 1 and 2 and one to five within positions 18-23 of the antisense strand (counting from the 5′-end).

[0425] In some embodiments, the dsRNA molecule of the disclosure further comprises one phosphorothioate internucleotide linkage modification within position 1-5 and one phosphorothioate or methylphosphonate internucleotide linkage modification within position 18-23 of the sense strand (counting from the 5′-end), and one phosphorothioate internucleotide linkage modification at positions 1 and 2 and two phosphorothioate or methylphosphonate internucleotide linkage modifications within positions 18-23 of the antisense strand (counting from the 5′-end).

[0426] In some embodiments, the dsRNA molecule of the disclosure further comprises two phosphorothioate internucleotide linkage modifications within position 1-5 and one phosphorothioate internucleotide linkage modification within position 18-23 of the sense strand (counting from the 5′-end), and one phosphorothioate internucleotide linkage modification at positions 1 and 2 and two phosphorothioate internucleotide linkage modifications within positions 18-23 of the antisense strand (counting from the 5′-end).

[0427] In some embodiments, the dsRNA molecule of the disclosure further comprises two phosphorothioate internucleotide linkage modifications within position 1-5 and two phosphorothioate internucleotide linkage modifications within position 18-23 of the sense strand (counting from the 5′-end), and one phosphorothioate internucleotide linkage modification at positions 1 and 2 and two phosphorothioate internucleotide linkage modifications within positions 18-23 of the antisense strand (counting from the 5′-end).

[0428] In some embodiments, the dsRNA molecule of the disclosure further comprises two phosphorothioate internucleotide linkage modifications within position 1-5 and two phosphorothioate internucleotide linkage modifications within position 18-23 of the sense strand (counting from the 5′-end), and one phosphorothioate internucleotide linkage modification at positions 1 and 2 and one phosphorothioate internucleotide linkage modification within positions 18-23 of the antisense strand (counting from the 5′-end).

[0429] In some embodiments, the dsRNA molecule of the disclosure further comprises one phosphorothioate internucleotide linkage modification within position 1-5 and one phosphorothioate internucleotide linkage modification within position 18-23 of the sense strand (counting from the 5′-end), and two phosphorothioate internucleotide linkage modifications at positions 1 and 2 and two phosphorothioate internucleotide linkage modifications within positions 18-23 of the antisense strand (counting from the 5′-end).

[0430] In some embodiments, the dsRNA molecule of the disclosure further comprises one phosphorothioate internucleotide linkage modification within position 1-5 and one within position 18-23 of the sense strand (counting from the 5′-end), and two phosphorothioate internucleotide linkage modification at positions 1 and 2 and one phosphorothioate internucleotide linkage modification within positions 18-23 of the antisense strand (counting from the 5′-end).

[0431] In some embodiments, the dsRNA molecule of the disclosure further comprises one phosphorothioate internucleotide linkage modification within position 1-5 (counting from the 5′-end) of the sense strand, and two phosphorothioate internucleotide linkage modifications at positions 1 and 2 and one phosphorothioate internucleotide linkage modification within positions 18-23 of the antisense strand (counting from the 5′-end).

[0432] In some embodiments, the dsRNA molecule of the disclosure further comprises two phosphorothioate internucleotide linkage modifications within position 1-5 (counting from the 5′-end) of the sense strand, and one phosphorothioate internucleotide linkage modification at positions 1 and 2 and two phosphorothioate internucleotide linkage modifications within positions 18-23 of the antisense strand (counting from the 5′-end).

[0433] In some embodiments, the dsRNA molecule of the disclosure further comprises two phosphorothioate internucleotide linkage modifications within position 1-5 and one within position 18-23 of the sense strand (counting from the 5′-end), and two phosphorothioate internucleotide linkage modifications at positions 1 and 2 and one phosphorothioate internucleotide linkage modification within positions 18-23 of the antisense strand (counting from the 5′-end).

[0434] In some embodiments, the dsRNA molecule of the disclosure further comprises two phosphorothioate internucleotide linkage modifications within position 1-5 and one phosphorothioate internucleotide linkage modification within position 18-23 of the sense strand (counting from the 5′-end), and two phosphorothioate internucleotide linkage modifications at positions 1 and 2 and two phosphorothioate internucleotide linkage modifications within positions 18-23 of the antisense strand (counting from the 5′-end).

[0435] In some embodiments, the dsRNA molecule of the disclosure further comprises two phosphorothioate internucleotide linkage modifications within position 1-5 and one phosphorothioate internucleotide linkage modification within position 18-23 of the sense strand (counting from the 5′-end), and one phosphorothioate internucleotide linkage modification at positions 1 and 2 and two phosphorothioate internucleotide linkage modifications within positions 18-23 of the antisense strand (counting from the 5′-end).

[0436] In some embodiments, the dsRNA molecule of the disclosure further comprises two phosphorothioate internucleotide linkage modifications at position 1 and 2, and two phosphorothioate internucleotide linkage modifications at position 20 and 21 of the sense strand (counting from the 5′-end), and one phosphorothioate internucleotide linkage modification at positions 1 and one at position 21 of the antisense strand (counting from the 5′-end).

[0437] In some embodiments, the dsRNA molecule of the disclosure further comprises one phosphorothioate internucleotide linkage modification at position 1, and one phosphorothioate internucleotide linkage modification at position 21 of the sense strand (counting from the 5′-end), and two phosphorothioate internucleotide linkage modifications at positions 1 and 2 and two phosphorothioate internucleotide linkage modifications at positions 20 and 21 the antisense strand (counting from the 5′-end).

[0438] In some embodiments, the dsRNA molecule of the disclosure further comprises two phosphorothioate internucleotide linkage modifications at position 1 and 2, and two phosphorothioate internucleotide linkage modifications at position 21 and 22 of the sense strand (counting from the 5′-end), and one phosphorothioate internucleotide linkage modification at positions 1 and one phosphorothioate internucleotide linkage modification at position 21 of the antisense strand (counting from the 5′-end).

[0439] In some embodiments, the dsRNA molecule of the disclosure further comprises one phosphorothioate internucleotide linkage modification at position 1, and one phosphorothioate internucleotide linkage modification at position 21 of the sense strand (counting from the 5′-end), and two phosphorothioate internucleotide linkage modifications at positions 1 and 2 and two phosphorothioate internucleotide linkage modifications at positions 21 and 22 the antisense strand (counting from the 5′-end).

[0440] In some embodiments, the dsRNA molecule of the disclosure further comprises two phosphorothioate internucleotide linkage modifications at position 1 and 2, and two phosphorothioate internucleotide linkage modifications at position 22 and 23 of the sense strand (counting from the 5′-end), and one phosphorothioate internucleotide linkage modification at positions 1 and one phosphorothioate internucleotide linkage modification at position 21 of the antisense strand (counting from the 5′-end).

[0441] In some embodiments, the dsRNA molecule of the disclosure further comprises one phosphorothioate internucleotide linkage modification at position 1, and one phosphorothioate internucleotide linkage modification at position 21 of the sense strand (counting from the 5′-end), and two phosphorothioate internucleotide linkage modifications at positions 1 and 2 and two phosphorothioate internucleotide linkage modifications at positions 23 and 23 the antisense strand (counting from the 5′-end).

[0442] In some embodiments, compound of the disclosure comprises a pattern of backbone chiral centers. In some embodiments, a common pattern of backbone chiral centers comprises at least 5 internucleotidic linkages in the Sp configuration. In some embodiments, a common pattern of backbone chiral centers comprises at least 6 internucleotidic linkages in the Sp configuration. In some embodiments, a common pattern of backbone chiral centers comprises at least 7 internucleotidic linkages in the Sp configuration. In some embodiments, a common pattern of backbone chiral centers comprises at least 8 internucleotidic linkages in the Sp configuration. In some embodiments, a common pattern of backbone chiral centers comprises at least 9 internucleotidic linkages in the Sp configuration. In some embodiments, a common pattern of backbone chiral centers comprises at least 10 internucleotidic linkages in the Sp configuration. In some embodiments, a common pattern of backbone chiral centers comprises at least 11 internucleotidic linkages in the Sp configuration. In some embodiments, a common pattern of backbone chiral centers comprises at least 12 internucleotidic linkages in the Sp configuration. In some embodiments, a common pattern of backbone chiral centers comprises at least 13 internucleotidic linkages in the Sp configuration. In some embodiments, a common pattern of backbone chiral centers comprises at least 14 internucleotidic linkages in the Sp configuration. In some embodiments, a common pattern of backbone chiral centers comprises at least 15 internucleotidic linkages in the Sp configuration. In some embodiments, a common pattern of backbone chiral centers comprises at least 16 internucleotidic linkages in the Sp configuration. In some embodiments, a common pattern of backbone chiral centers comprises at least 17 internucleotidic linkages in the Sp configuration. In some embodiments, a common pattern of backbone chiral centers comprises at least 18 internucleotidic linkages in the Sp configuration. In some embodiments, a common pattern of backbone chiral centers comprises at least 19 internucleotidic linkages in the Sp configuration. In some embodiments, a common pattern of backbone chiral centers comprises no more than 8 internucleotidic linkages in the Rp configuration. In some embodiments, a common pattern of backbone chiral centers comprises no more than 7 internucleotidic linkages in the Rp configuration. In some embodiments, a common pattern of backbone chiral centers comprises no more than 6 internucleotidic linkages in the Rp configuration. In some embodiments, a common pattern of backbone chiral centers comprises no more than 5 internucleotidic linkages in the Rp configuration. In some embodiments, a common pattern of backbone chiral centers comprises no more than 4 internucleotidic linkages in the Rp configuration. In some embodiments, a common pattern of backbone chiral centers comprises no more than 3 internucleotidic linkages in the Rp configuration. In some embodiments, a common pattern of backbone chiral centers comprises no more than 2 internucleotidic linkages in the Rp configuration. In some embodiments, a common pattern of backbone chiral centers comprises no more than 1 internucleotidic linkages in the Rp configuration. In some embodiments, a common pattern of backbone chiral centers comprises no more than 8 internucleotidic linkages which are not chiral (as a non-limiting example, a phosphodiester). In some embodiments, a common pattern of backbone chiral centers comprises no more than 7 internucleotidic linkages which are not chiral. In some embodiments, a common pattern of backbone chiral centers comprises no more than 6 internucleotidic linkages which are not chiral. In some embodiments, a common pattern of backbone chiral centers comprises no more than 5 internucleotidic linkages which are not chiral. In some embodiments, a common pattern of backbone chiral centers comprises no more than 4 internucleotidic linkages which are not chiral. In some embodiments, a common pattern of backbone chiral centers comprises no more than 3 internucleotidic linkages which are not chiral. In some embodiments, a common pattern of backbone chiral centers comprises no more than 2 internucleotidic linkages which are not chiral. In some embodiments, a common pattern of backbone chiral centers comprises no more than 1 internucleotidic linkages which are not chiral. In some embodiments, a common pattern of backbone chiral centers comprises at least 10 internucleotidic linkages in the Sp configuration, and no more than 8 internucleotidic linkages which are not chiral. In some embodiments, a common pattern of backbone chiral centers comprises at least 11 internucleotidic linkages in the Sp configuration, and no more than 7 internucleotidic linkages which are not chiral. In some embodiments, a common pattern of backbone chiral centers comprises at least 12 internucleotidic linkages in the Sp configuration, and no more than 6 internucleotidic linkages which are not chiral. In some embodiments, a common pattern of backbone chiral centers comprises at least 13 internucleotidic linkages in the Sp configuration, and no more than 6 internucleotidic linkages which are not chiral. In some embodiments, a common pattern of backbone chiral centers comprises at least 14 internucleotidic linkages in the Sp configuration, and no more than 5 internucleotidic linkages which are not chiral. In some embodiments, a common pattern of backbone chiral centers comprises at least 15 internucleotidic linkages in the Sp configuration, and no more than 4 internucleotidic linkages which are not chiral. In some embodiments, the internucleotidic linkages in the Sp configuration are optionally contiguous or not contiguous. In some embodiments, the internucleotidic linkages in the Rp configuration are optionally contiguous or not contiguous. In some embodiments, the internucleotidic linkages which are not chiral are optionally contiguous or not contiguous.

[0443] In some embodiments, compound of the disclosure comprises a block is a stereochemistry block. In some embodiments, a block is an Rp block in that each internucleotidic linkage of the block is Rp. In some embodiments, a 5′-block is an Rp block. In some embodiments, a 3′-block is an Rp block. In some embodiments, a block is an Sp block in that each internucleotidic linkage of the block is Sp. In some embodiments, a 5′-block is an Sp block. In some embodiments, a 3′-block is an Sp block. In some embodiments, provided oligonucleotides comprise both Rp and Sp blocks. In some embodiments, provided oligonucleotides comprise one or more Rp but no Sp blocks. In some embodiments, provided oligonucleotides comprise one or more Sp but no Rp blocks. In some embodiments, provided oligonucleotides comprise one or more PO blocks wherein each internucleotidic linkage in a natural phosphate linkage.

[0444] In some embodiments, compound of the disclosure comprises a 5′-block is an Sp block wherein each sugar moiety comprises a 2′-F modification. In some embodiments, a 5′-block is an Sp block wherein each of internucleotidic linkage is a modified internucleotidic linkage and each sugar moiety comprises a 2′-F modification. In some embodiments, a 5′-block is an Sp block wherein each of internucleotidic linkage is a phosphorothioate linkage and each sugar moiety comprises a 2′-F modification. In some embodiments, a 5′-block comprises 4 or more nucleoside units. In some embodiments, a 5′-block comprises 5 or more nucleoside units. In some embodiments, a 5′-block comprises 6 or more nucleoside units. In some embodiments, a 5′-block comprises 7 or more nucleoside units. In some embodiments, a 3′-block is an Sp block wherein each sugar moiety comprises a 2′-F modification. In some embodiments, a 3′-block is an Sp block wherein each of internucleotidic linkage is a modified internucleotidic linkage and each sugar moiety comprises a 2′-F modification. In some embodiments, a 3′-block is an Sp block wherein each of internucleotidic linkage is a phosphorothioate linkage and each sugar moiety comprises a 2′-F modification. In some embodiments, a 3′-block comprises 4 or more nucleoside units. In some embodiments, a 3′-block comprises 5 or more nucleoside units. In some embodiments, a 3′-block comprises 6 or more nucleoside units. In some embodiments, a 3′-block comprises 7 or more nucleoside units.

[0445] In some embodiments, compound of the disclosure comprises a type of nucleoside in a region or an oligonucleotide is followed by a specific type of internucleotidic linkage, e.g., natural phosphate linkage, modified internucleotidic linkage, Rp chiral internucleotidic linkage, Sp chiral internucleotidic linkage, etc. In some embodiments, A is followed by Sp. In some embodiments, A is followed by Rp. In some embodiments, A is followed by natural phosphate linkage (PO). In some embodiments, U is followed by Sp. In some embodiments, U is followed by Rp. In some embodiments, U is followed by natural phosphate linkage (PO). In some embodiments, C is followed by Sp. In some embodiments, C is followed by Rp. In some embodiments, C is followed by natural phosphate linkage (PO). In some embodiments, G is followed by Sp. In some embodiments, G is followed by Rp. In some embodiments, G is followed by natural phosphate linkage (PO). In some embodiments, C and U are followed by Sp. In some embodiments, C and U are followed by Rp. In some embodiments, C and U are followed by natural phosphate linkage (PO). In some embodiments, A and G are followed by Sp. In some embodiments, A and G are followed by Rp.

[0446] In some embodiments, the dsRNA molecule of the disclosure comprises mismatch(es) with the target, within the duplex, or combinations thereof. The mismatch can occur in the overhang region or the duplex region. The base pair can be ranked on the basis of their propensity to promote dissociation or melting (e.g., on the free energy of association or dissociation of a particular pairing, the simplest approach is to examine the pairs on an individual pair basis, though next neighbor or similar analysis can also be used). In terms of promoting dissociation: A:U is preferred over G:C; G:U is preferred over G:C; and I:C is preferred over G:C (I=inosine). Mismatches, e.g., non-canonical or other than canonical pairings (as described elsewhere herein) are preferred over canonical (A:T, A:U, G:C) pairings; and pairings which include a universal base are preferred over canonical pairings.

[0447] In some embodiments, the dsRNA molecule of the disclosure comprises at least one of the first 1, 2, 3, 4, or 5 base pairs within the duplex regions from the 5′-end of the antisense strand can be chosen independently from the group of: A:U, G:U, I:C, and mismatched pairs, e.g., non-canonical or other than canonical pairings or pairings which include a universal base, to promote the dissociation of the antisense strand at the 5′-end of the duplex.

[0448] In some embodiments, the nucleotide at the 1 position within the duplex region from the 5′-end in the antisense strand is selected from the group consisting of A, dA, dU, U, and dT. Alternatively, at least one of the first 1, 2 or 3 base pair within the duplex region from the 5′-end of the antisense strand is an AU base pair. For example, the first base pair within the duplex region from the 5′-end of the antisense strand is an AU base pair.

[0449] It was found that introducing 4′-modified or 5′-modified nucleotide to the 3′-end of a phosphodiester (PO), phosphorothioate (PS), or phosphorodithioate (PS2) linkage of a dinucleotide at any position of single stranded or double stranded oligonucleotide can exert steric effect to the internucleotide linkage and, hence, protecting or stabilizing it against nucleases.

[0450] In some embodiments, 5′-modified nucleoside is introduced at the 3′-end of a dinucleotide at any position of single stranded or double stranded siRNA. For instance, a 5′-alkylated nucleoside may be introduced at the 3′-end of a dinucleotide at any position of single stranded or double stranded si RNA. The alkyl group at the 5′ position of the ribose sugar can be racemic or chirally pure R or S isomer. An exemplary 5′-alkylated nucleoside is 5′-methyl nucleoside. The 5′-methyl can be either racemic or chirally pure R or S isomer.

[0451] In some embodiments, 4′-modified nucleoside is introduced at the 3′-end of a dinucleotide at any position of single stranded or double stranded siRNA. For instance, a 4′-alkylated nucleoside may be introduced at the 3′-end of a dinucleotide at any position of single stranded or double stranded siRNA. The alkyl group at the 4′ position of the ribose sugar can be racemic or chirally pure R or S isomer. An exemplary 4′-alkylated nucleoside is 4′-methyl nucleoside. The 4′-methyl can be either racemic or chirally pure R or S isomer. Alternatively, a 4′-O-alkylated nucleoside may be introduced at the 3′-end of a dinucleotide at any position of single stranded or double stranded siRNA. The 4′-O-alkyl of the ribose sugar can be racemic or chirally pure R or S isomer. An exemplary 4′-O-alkylated nucleoside is 4′-O-methyl nucleoside. The 4′-O-methyl can be either racemic or chirally pure R or S isomer.

[0452] In some embodiments, 5′-alkylated nucleoside is introduced at any position on the sense strand or antisense strand of a dsRNA, and such modification maintains or improves potency of the dsRNA. The 5′-alkyl can be either racemic or chirally pure R or S isomer. An exemplary 5′-alkylated nucleoside is 5′-methyl nucleoside. The 5′-methyl can be either racemic or chirally pure R or S isomer.

[0453] In some embodiments, 4′-alkylated nucleoside is introduced at any position on the sense strand or antisense strand of a dsRNA, and such modification maintains or improves potency of the dsRNA. The 4′-alkyl can be either racemic or chirally pure R or S isomer. An exemplary 4′-alkylated nucleoside is 4′-methyl nucleoside. The 4′-methyl can be either racemic or chirally pure R or S isomer.

[0454] In some embodiments, 4′-O-alkylated nucleoside is introduced at any position on the sense strand or antisense strand of a dsRNA, and such modification maintains or improves potency of the dsRNA. The 5′-alkyl can be either racemic or chirally pure R or S isomer. An exemplary 4′-O-alkylated nucleoside is 4′-O-methyl nucleoside. The 4′-O-methyl can be either racemic or chirally pure R or S isomer.

[0455] In some embodiments, the dsRNA molecule of the disclosure can comprise 2′-5′ linkages (with 2′-H, 2′-OH, and 2′-OMe and with P═O or P═S). For example, the 2′-5′ linkages modifications can be used to promote nuclease resistance or to inhibit binding of the sense to the antisense strand, or can be used at the 5′ end of the sense strand to avoid sense strand activation by RISC.

[0456] In another embodiment, the dsRNA molecule of the disclosure can comprise L sugars (e.g., L ribose, L-arabinose with 2′-H, 2′-OH and 2′-OMe). For example, these L sugars modifications can be used to promote nuclease resistance or to inhibit binding of the sense to the antisense strand, or can be used at the 5′ end of the sense strand to avoid sense strand activation by RISC.

[0457] Various publications describe multimeric siRNA which can all be used with the dsRNA of the disclosure. Such publications include WO2007/091269, U.S. Pat. No. 7,858,769, WO2010/141511, WO2007/117686, WO2009/014887, and WO2011/031520 which are hereby incorporated by their entirely.

[0458] In some embodiments dsRNA molecules of the disclosure are 5′ phosphorylated or include a phosphoryl analog at the 5′ prime terminus. 5′-phosphate modifications include those which are compatible with RISC mediated gene silencing. Suitable modifications include: 5′-monophosphate ((HO)₂(O)P—O-5′); 5′-diphosphate ((HO)₂(O)P—O—P(HO)(O)—O-5′); 5′-triphosphate ((HO)₂(O)P—O—(HO)(O)P—O—P(HO)(O)—O-5′); 5′-guanosine cap (7-methylated or non-methylated) (7m-G-O-5′-(HO)(O)P—O—(HO)(O)P—O—P(HO)(O)—O-5′); 5′-adenosine cap (Appp), and any modified or unmodified nucleotide cap structure (N—O-5′-(HO)(O)P—O—(HO)(O)P—O—P(HO)(O)—O-5′); 5′-monothiophosphate (phosphorothioate; (HO)₂(S)P—O-5′); 5′-monodithiophosphate (phosphorodithioate; (HO)(HS)(S)P—O-5′), 5′-phosphorothiolate ((HO)2(O)P—S-5′); any additional combination of oxygen/sulfur replaced monophosphate, diphosphate and triphosphates (e.g. 5′-alpha-thiotriphosphate, 5′-gamma-thiotriphosphate, etc.), 5′-phosphoramidates ((HO)₂(O)P—NH-5′, (HO)(NH₂)(O)P—O-5′), 5′-alkylphosphonates (R=alkyl=methyl, ethyl, isopropyl, propyl, etc., e.g. RP(OH)(O)—O-5′-, 5′-alkenylphosphonates (i.e. vinyl, substituted vinyl), (OH)₂(O)P-5′-CH₂—), 5′-alkyletherphosphonates (R=alkylether=methoxymethyl (MeOCH2-), ethoxymethyl, etc., e.g. RP(OH)(O)—O-5′-). In one example, the modification can in placed in the antisense strand of a dsRNA molecule.

### F. Linkers

[0459] In some embodiments, the conjugate or ligand described herein can be attached to an iRNA oligonucleotide with various linkers that can be cleavable or non-cleavable.

[0460] Linkers typically comprise a direct bond or an atom such as oxygen or sulfur, a unit such as NR8, C(O), C(O)NH, SO, SO₂, SO₂NH or a chain of atoms, such as, but not limited to, substituted or unsubstituted alkyl, substituted or unsubstituted alkenyl, substituted or unsubstituted alkynyl, arylalkyl, arylalkenyl, arylalkynyl, heteroarylalkyl, heteroarylalkenyl, heteroarylalkynyl, heterocyclylalkyl, heterocyclylalkenyl, heterocyclylalkynyl, aryl, heteroaryl, heterocyclyl, cycloalkyl, cycloalkenyl, alkylarylalkyl, alkylarylalkenyl, alkylarylalkynyl, alkenylarylalkyl, alkenylarylalkenyl, alkenylarylalkynyl, alkynylarylalkyl, alkynylarylalkenyl, alkynylarylalkynyl, alkylheteroarylalkyl, alkylheteroarylalkenyl, alkylheteroarylalkynyl, alkenylheteroarylalkyl, alkenylheteroarylalkenyl, alkenylheteroarylalkynyl, alkynylheteroarylalkyl, alkynylheteroarylalkenyl, alkynylheteroarylalkynyl, alkylheterocyclylalkyl, alkylheterocyclylalkenyl, alkylhererocyclylalkynyl, alkenylheterocyclylalkyl, alkenylheterocyclylalkenyl, alkenylheterocyclylalkynyl, alkynylheterocyclylalkyl, alkynylheterocyclylalkenyl, alkynylheterocyclylalkynyl, alkylaryl, alkenylaryl, alkynylaryl, alkylheteroaryl, alkenylheteroaryl, alkynylhereroaryl, which one or more methylenes can be interrupted or terminated by O, S, S(O), SO₂, N(R8), C(O), substituted or unsubstituted aryl, substituted or unsubstituted heteroaryl, substituted or unsubstituted heterocyclic; where R8 is hydrogen, acyl, aliphatic or substituted aliphatic. In some embodiments, the linker is between about 1-24 atoms, 2-24, 3-24, 4-24, 5-24, 6-24, 6-18, 7-18, 8-18 atoms, 7-17, 8-17, 6-16, 7-16, or 8-16 atoms.

[0461] In some embodiments, a dsRNA of the disclosure is conjugated to a bivalent or trivalent branched linker selected from the group of structures shown in any of formula (XXXI)-(XXXIV):

[chemical structure]

[0462] wherein:
[0463] q2A, q2B, q3A, q3B, q4A, q4B, q5A, q5B3 and q5C represent independently for each occurrence 0-20 and wherein the repeating unit can be the same or different;
[0464] P^{2A}, P^{2B}, P^{3A}, P^{3B}, P^{4A}, P^{4B}, P^{5A}, P^{5B}, P^{5C}, T^{2A}, T^{2B}, T^{3A}, T^{3B}, V^{4A}, T^{4B}, T^{4A}, T^{5B}, T^{5C} are each independently for each occurrence absent, CO, NH, O, S, OC(O), NHC(O), CH₂, CH₂NH or CH₂O;
[0465] Q^{2A}, Q^{2B}, Q^{3A}, Q^{3B}, Q^{4A}, Q^{4B}, Q^{5A}, Q^{5B}, Q^{5C} are independently for each occurrence absent, alkylene, substituted alkylene wherein one or more methylenes can be interrupted or terminated by one or more of O, S, S(O), SO₂, N(R^{N}), C(R′)═C(R″), C≡C or C(O);
[0466] R^{2A}, R^{2B}, R^{3A}, R^{3B}, R^{4A}, R^{4B}, R^{5A}, R^{5B}, R^{5C} are each independently for each occurrence absent, NH, O, S, CH₂, C(O)O, C(O)NH, NHCH(R^{a})C(O), —C(O)—CH(R^{a})—NH—, CO, CH═N—O,

[chemical structure]

or heterocyclyl;
[0467] L^{2A}, L^{2B}, L^{3A}, L^{3B}, L^{4A}, L^{4B}, L^{5A}, L^{5B} and L^{5C} represent the ligand; i.e. each independently for each occurrence a monosaccharide (such as GalNAc), disaccharide, trisaccharide, tetrasaccharide, oligosaccharide, or polysaccharide, and R^{a} is H or amino acid side chain. Trivalent conjugating GalNAc derivatives are particularly useful for use with RNAi agents for inhibiting the expression of a target gene, such as those of formula (XXXV):

[chemical structure]

[0468] wherein L^{5A}, L^{5B} and L^{5C} represent a monosaccharide, such as GalNAc derivative.

[0469] Examples of suitable bivalent and trivalent branched linker groups conjugating GalNAc derivatives include, but are not limited to, the structures recited above as formulas II, VII, XI, X, and XIII.

[0470] A cleavable linking group is one which is sufficiently stable outside the cell, but which upon entry into a target cell is cleaved to release the two parts the linker is holding together. In a some embodiments, the cleavable linking group is cleaved at least about 10 times, 20, times, 30 times, 40 times, 50 times, 60 times, 70 times, 80 times, 90 times or more, or at least about 100 times faster in a target cell or under a first reference condition (which can, e.g., be selected to mimic or represent intracellular conditions) than in the blood of a subject, or under a second reference condition (which can, e.g., be selected to mimic or represent conditions found in the blood or serum).

[0471] Cleavable linking groups are susceptible to cleavage agents, e.g., pH, redox potential or the presence of degradative molecules. Generally, cleavage agents are more prevalent or found at higher levels or activities inside cells than in serum or blood. Examples of such degradative agents include: redox agents which are selected for particular substrates or which have no substrate specificity, including, e.g., oxidative or reductive enzymes or reductive agents such as mercaptans, present in cells, that can degrade a redox cleavable linking group by reduction; esterases; endosomes or agents that can create an acidic environment, e.g., those that result in a pH of five or lower; enzymes that can hydrolyze or degrade an acid cleavable linking group by acting as a general acid, peptidases (which can be substrate specific), and phosphatases.

[0472] A cleavable linkage group, such as a disulfide bond can be susceptible to pH. The pH of human serum is 7.4, while the average intracellular pH is slightly lower, ranging from about 7.1-7.3. Endosomes have a more acidic pH, in the range of 5.5-6.0, and lysosomes have an even more acidic pH at around 5.0. Some linkers will have a cleavable linking group that is cleaved at a suitable pH, thereby releasing a cationic lipid from the ligand inside the cell, or into the desired compartment of the cell.

[0473] A linker can include a cleavable linking group that is cleavable by a particular enzyme. The type of cleavable linking group incorporated into a linker can depend on the cell to be targeted.

[0474] In general, the suitability of a candidate cleavable linking group can be evaluated by testing the ability of a degradative agent (or condition) to cleave the candidate linking group. It will also be desirable to also test the candidate cleavable linking group for the ability to resist cleavage in the blood or when in contact with other non-target tissue. Thus, one can determine the relative susceptibility to cleavage between a first and a second condition, where the first is selected to be indicative of cleavage in a target cell and the second is selected to be indicative of cleavage in other tissues or biological fluids, e.g., blood or serum. The evaluations can be carried out in cell free systems, in cells, in cell culture, in organ or tissue culture, or in whole animals. It can be useful to make initial evaluations in cell-free or culture conditions and to confirm by further evaluations in whole animals. In some embodiments, useful candidate compounds are cleaved at least about 2, 4, 10, 20, 30, 40, 50, 60, 70, 80, 90, or about 100 times faster in the cell (or under in vitro conditions selected to mimic intracellular conditions) as compared to blood or serum (or under in vitro conditions selected to mimic extracellular conditions).

i. Redox Cleavable Linking Groups

[0475] In some embodiments, a cleavable linking group is a redox cleavable linking group that is cleaved upon reduction or oxidation. An example of reductively cleavable linking group is a disulphide linking group (—S—S—). To determine if a candidate cleavable linking group is a suitable “reductively cleavable linking group,” or for example is suitable for use with a particular iRNA moiety and particular targeting agent one can look to methods described herein. For example, a candidate can be evaluated by incubation with dithiothreitol (DTT), or other reducing agent using reagents know in the art, which mimic the rate of cleavage which would be observed in a cell, e.g., a target cell. The candidates can also be evaluated under conditions which are selected to mimic blood or serum conditions. In one, candidate compounds are cleaved by at most about 10% in the blood. In other embodiments, useful candidate compounds are degraded at least about 2, 4, 10, 20, 30, 40, 50, 60, 70, 80, 90, or about 100 times faster in the cell (or under in vitro conditions selected to mimic intracellular conditions) as compared to blood (or under in vitro conditions selected to mimic extracellular conditions). The rate of cleavage of candidate compounds can be determined using standard enzyme kinetics assays under conditions chosen to mimic intracellular media and compared to conditions chosen to mimic extracellular media.

ii. Phosphate-Based Cleavable Linking Groups

[0476] In some embodiments, a cleavable linker comprises a phosphate-based cleavable linking group. A phosphate-based cleavable linking group is cleaved by agents that degrade or hydrolyze the phosphate group. An example of an agent that cleaves phosphate groups in cells are enzymes such as phosphatases in cells. Examples of phosphate-based linking groups are —O—P(O)(ORk)-O—, —O—P(S)(ORk)-O—, —O—P(S)(SRk)-O—, —S—P(O)(ORk)-O—, —O—P(O)(ORk)-S—, —S—P(O)(ORk)-S—, —O—P(S)(ORk)-S—, —S—P(S)(ORk)-O—, —O—P(O)(Rk)-O—, —O—P(S)(Rk)-O—, —S—P(O)(Rk)-O—, —S—P(S)(Rk)-O—, —S—P(O)(Rk)-S—, —O—P(S)(Rk)-S—. In some embodiments, phosphate-based linking groups are —O—P(O)(OH)—O—, —O—P(S)(OH)—O—, —O—P(S)(SH)—O—, —S—P(O)(OH)—O—, —O—P(O)(OH)—S—, —S—P(O)(OH)—S—, —O—P(S)(OH)—S—, —S—P(S)(OH)—O—, —O—P(O)(H)—O—, —O—P(S)(H)—O—, —S—P(O)(H)—O, —S—P(S)(H)—O—, —S—P(O)(H)—S—, —O—P(S)(H)—S—, wherein Rk at each occurrence can be, independently, C1-C20 alkyl, C1-C20 haloalkyl, C6-C10 aryl, or C7-C12 aralkyl. In some embodiments, a phosphate-based linking group is —O—P(O)(OH)—O—. These candidates can be evaluated using methods analogous to those described above.

iii. Acid Cleavable Linking Groups

[0477] In some embodiments, a cleavable linker comprises an acid cleavable linking group. An acid cleavable linking group is a linking group that is cleaved under acidic conditions. In some embodiments acid cleavable linking groups are cleaved in an acidic environment with a pH of about 6.5 or lower (e.g., about 6.0, 5.75, 5.5, 5.25, 5.0, or lower), or by agents such as enzymes that can act as a general acid. In a cell, specific low pH organelles, such as endosomes and lysosomes can provide a cleaving environment for acid cleavable linking groups. Examples of acid cleavable linking groups include but are not limited to hydrazones, esters, and esters of amino acids. Acid cleavable groups can have the general formula —C═NN—, C(O)O, or —OC(O). In some embodiments, the carbon attached to the oxygen of the ester (the alkoxy group) is an aryl group, substituted alkyl group, or tertiary alkyl group such as dimethyl pentyl or t-butyl. These candidates can be evaluated using methods analogous to those described above.

iv. Ester-Based Cleavable Linking Groups

[0478] In some embodiments, a cleavable linker comprises an ester-based cleavable linking group. An ester-based cleavable linking group is cleaved by enzymes such as esterases and amidases in cells. Examples of ester-based cleavable linking groups include but are not limited to esters of alkylene, alkenylene and alkynylene groups. Ester cleavable linking groups have the general formula —C(O)O—, or —OC(O)—. These candidates can be evaluated using methods analogous to those described above.

v. Peptide-Based Cleavable Linking Groups

[0479] In some embodiments, a cleavable linker comprises a peptide-based cleavable linking group. A peptide-based cleavable linking group is cleaved by enzymes such as peptidases and proteases in cells. Peptide-based cleavable linking groups are peptide bonds formed between amino acids to yield oligopeptides (e.g., dipeptides, tripeptides etc.) and polypeptides. Peptide-based cleavable groups do not include the amide group (—C(O)NH—). The amide group can be formed between any alkylene, alkenylene or alkynelene. A peptide bond is a special type of amide bond formed between amino acids to yield peptides and proteins. The peptide-based cleavage group is generally limited to the peptide bond (i.e., the amide bond) formed between amino acids yielding peptides and proteins and does not include the entire amide functional group. Peptide-based cleavable linking groups have the general formula —NHCHR^{A}C(O)NHCHR^{B}C(O)—, where R^{A} and R^{B} are the R groups of the two adjacent amino acids. These candidates can be evaluated using methods analogous to those described above. Representative U.S. patents that teach the preparation of RNA conjugates include, but are not limited to, U.S. Pat. Nos. 4,828,979; 4,948,882; 5,218,105; 5,525,465; 5,541,313; 5,545,730; 5,552,538; 5,578,717, 5,580,731; 5,591,584; 5,109,124; 5,118,802; 5,138,045; 5,414,077; 5,486,603; 5,512,439; 5,578,718; 5,608,046; 4,587,044; 4,605,735; 4,667,025; 4,762,779; 4,789,737; 4,824,941; 4,835,263; 4,876,335; 4,904,582; 4,958,013; 5,082,830; 5,112,963; 5,214,136; 5,082,830; 5,112,963; 5,214,136; 5,245,022; 5,254,469; 5,258,506; 5,262,536; 5,272,250; 5,292,873; 5,317,098; 5,371,241, 5,391,723; 5,416,203, 5,451,463; 5,510,475; 5,512,667; 5,514,785; 5,565,552; 5,567,810; 5,574,142; 5,585,481; 5,587,371; 5,595,726; 5,597,696; 5,599,923; 5,599,928 and 5,688,941; 6,294,664; 6,320,017; 6,576,752; 6,783,931; 6,900,297; 7,037,646; 8,106,022, the entire contents of each of which is herein incorporated by reference.

[0480] It is not necessary for all positions in a given compound to be uniformly modified, and in fact more than one of the aforementioned modifications may be incorporated in a single compound or even at a single nucleoside within an iRNA. The present disclosure also includes iRNA compounds that are chimeric compounds.

[0481] “Chimeric” iRNA compounds, or “chimeras,” in the context of the present disclosure, are iRNA compounds, e.g., dsRNAs, that contain two or more chemically distinct regions, each made up of at least one monomer unit, i.e., a nucleotide in the case of a dsRNA compound. These iRNAs typically contain at least one region wherein the RNA is modified so as to confer upon the iRNA increased resistance to nuclease degradation, increased cellular uptake, and/or increased binding affinity for the target nucleic acid. An additional region of the iRNA may serve as a substrate for enzymes capable of cleaving RNA:DNA or RNA:RNA hybrids. By way of example, RNase H is a cellular endonuclease which cleaves the RNA strand of an RNA:DNA duplex. Activation of RNase H, therefore, results in cleavage of the RNA target, thereby greatly enhancing the efficiency of iRNA inhibition of gene expression. Consequently, comparable results can often be obtained with shorter iRNAs when chimeric dsRNAs are used, compared to phosphorothioate deoxy dsRNAs hybridizing to the same target region. Cleavage of the RNA target can be routinely detected by gel electrophoresis and, if necessary, associated nucleic acid hybridization techniques known in the art.

[0482] In certain instances, the RNA of an iRNA can be modified by a non-ligand group. A number of non-ligand molecules have been conjugated to iRNAs in order to enhance the activity, cellular distribution or cellular uptake of the iRNA, and procedures for performing such conjugations are available in the scientific literature. Such non-ligand moieties have included lipid moieties, such as cholesterol (Kubo, T. et al., Biochem. Biophys. Res. Comm., 2007, 365(1):54-61; Letsinger et al., Proc. Natl. Acad. Sci. USA, 1989, 86:6553), cholic acid (Manoharan et al., Bioorg. Med. Chem. Lett., 1994, 4:1053), a thioether, e.g., hexyl-S-tritylthiol (Manoharan et al., Ann. N.Y. Acad. Sci., 1992, 660:306; Manoharan et al., Bioorg. Med. Chem. Let., 1993, 3:2765), a thiocholesterol (Oberhauser et al., Nucl. Acids Res., 1992, 20:533), an aliphatic chain, e.g., dodecandiol or undecyl residues (Saison-Behmoaras et al., EMBO J., 1991, 10:111; Kabanov et al., FEBS Lett., 1990, 259:327; Svinarchuk et al., Biochimie, 1993, 75:49), a phospholipid, e.g., di-hexadecyl-rac-glycerol or triethylammonium 1,2-di-O-hexadecyl-mc-glycero-3-H-phosphonate (Manoharan et al., Tetrahedron Lett., 1995, 36:3651; Shea et al., Nucl. Acids Res., 1990, 18:3777), a polyamine or a polyethylene glycol chain (Manoharan et al., Nucleosides & Nucleotides, 1995, 14:969), or adamantane acetic acid (Manoharan et al., Tetrahedron Lett., 1995, 36:3651), a palmityl moiety (Mishra et al., Biochim. Biophys. Acta, 1995, 1264:229), or an octadecylamine or hexylamino-carbonyl-oxycholesterol moiety (Crooke et al., J. Pharmacol. Exp. 7her., 1996, 277:923). Representative United States patents that teach the preparation of such RNA conjugates have been listed above. Typical conjugation protocols involve the synthesis of an RNAs bearing an aminolinker at one or more positions of the sequence. The amino group is then reacted with the molecule being conjugated using appropriate coupling or activating reagents. The conjugation reaction may be performed either with the RNA still bound to the solid support or following cleavage of the RNA, in solution phase. Purification of the RNA conjugate by HPLC typically affords the pure conjugate.

### V. Delivery of iRNA

[0483] The delivery of an iRNA to a subject in need thereof can be achieved in a number of different ways. In vivo delivery can be performed directly by administering a composition comprising an iRNA, e.g. a dsRNA, to a subject. Alternatively, delivery can be performed indirectly by administering one or more vectors that encode and direct the expression of the iRNA. These alternatives are discussed further below.

### A. Direct Delivery

[0484] In general, any method of delivering a nucleic acid molecule can be adapted for use with an iRNA (see e.g., Akhtar S. and Julian R L. (1992) Trends Cell. Biol. 2(5):139-144 and WO94/02595, which are incorporated herein by reference in their entireties). However, there are three factors that are important to consider in order to successfully deliver an iRNA molecule in vivo: (a) biological stability of the delivered molecule, (2) preventing non-specific effects, and (3) accumulation of the delivered molecule in the target tissue. The non-specific effects of an iRNA can be minimized by local administration, for example by direct injection or implantation into a tissue (as a non-limiting example, the eye) or topically administering the preparation. Local administration to a treatment site maximizes local concentration of the agent, limits the exposure of the agent to systemic tissues that may otherwise be harmed by the agent or that may degrade the agent, and permits a lower total dose of the iRNA molecule to be administered. Several studies have shown successful knockdown of gene products when an iRNA is administered locally. For example, intraocular delivery of a dsRNA by intravitreal injection in cynomolgus monkeys (Tolentino, M J., et al (2004) Retina 24:132-138) and subretinal injections in mice (Reich, S J., et al (2003) Mol. Vis. 9:210-216) were both shown to prevent neovascularization in an experimental model of age-related macular degeneration. In addition, direct intratumoral injection of a dsRNA in mice reduces tumor volume (Pille, J., et al (2005) Mol. Ther. 11:267-274) and can prolong survival of tumor-bearing mice (Kim, W J., et al (2006) Mol. Ther. 14.343-350; Li, S., et al (2007) Mol. Ther. 15:515-523). RNA interference has also shown success with local delivery to the CNS by direct injection (Dorn, G., et al. (2004) Nucleic Acids 32:e49; Tan, P H., et al (2005) Gene Ther. 12:59-66; Makimura, H., et al (2002) BMC Neurosci. 3:18; Shishkina, G T., et al (2004) Neuroscience 129:521-528; Thakker, E R., et al (2004)Proc. Natl. Acad. Sci. U.S.A. 101:17270-17275; Akaneya, Y., et al (2005) J. Neurophysiol. 93:594-602) and to the lungs by intranasal administration (Howard, K A., et al (2006) Mol. Ther. 14:476-484; Zhang, X., et al (2004) J. Biol. Chem. 279:10677-10684; Bitko, V., et al (2005) Nat. Med 11:50-55). For administering an iRNA systemically for the treatment of a disease, the RNA can be modified or alternatively delivered using a drug delivery system; both methods act to prevent the rapid degradation of the dsRNA by endo- and exo-nucleases in vivo.

[0485] Modification of the RNA or the pharmaceutical carrier can also permit targeting of the iRNA composition to the target tissue and avoid undesirable off-target effects. iRNA molecules can be modified by chemical conjugation to other groups, e.g., a lipid or carbohydrate group as described herein. Such conjugates can be used to target iRNA to particular cells, e.g., liver cells, e.g., hepatocytes. For example, GalNAc conjugates or lipid (e.g., LNP) formulations can be used to target iRNA to particular cells, e.g., liver cells, e.g., hepatocytes.

[0486] iRNA molecules can also be modified by chemical conjugation to lipophilic groups such as cholesterol to enhance cellular uptake and prevent degradation. For example, an iRNA directed against ApoB conjugated to a lipophilic cholesterol moiety was injected systemically into mice and resulted in knockdown of apoB mRNA in both the liver and jejunum (Soutschek, J., et al (2004) Nature 432:173-178). Conjugation of an iRNA to an aptamer has been shown to inhibit tumor growth and mediate tumor regression in a mouse model of prostate cancer (McNamara, J O., et al (2006) Nat. Biotechnol. 24:1005-1015). In an alternative embodiment, the iRNA can be delivered using drug delivery systems such as a nanoparticle, a dendrimer, a polymer, liposomes, or a cationic delivery system. Positively charged cationic delivery systems facilitate binding of an iRNA molecule (negatively charged) and also enhance interactions at the negatively charged cell membrane to permit efficient uptake of an iRNA by the cell. Cationic lipids, dendrimers, or polymers can either be bound to an iRNA, or induced to form a vesicle or micelle (see e.g., Kim S H., et al (2008) Journal of Controlled Release 129(2):107-116) that encases an iRNA. The formation of vesicles or micelles further prevents degradation of the iRNA when administered systemically. Methods for making and administering cationic-iRNA complexes are well within the abilities of one skilled in the art (see e.g., Sorensen, D R., et al (2003)J. Mol. Biol 327:761-766; Verma, UN., et al (2003) Clin. Cancer Res. 9:1291-1300; Arnold, A S et al (2007). J. Hypertens. 25:197-205, which are incorporated herein by reference in their entirety). Some non-limiting examples of drug delivery systems useful for systemic delivery of iRNAs include DOTAP (Sorensen, D R., et al (2003), supra; Verma, U N., et al (2003), supra), Oligofectamine, “solid nucleic acid lipid particles” (Zimmermann, T S., et al (2006) Nature 441:111-114), cardiolipin (Chien, P Y., et al (2005) Cancer Gene Ther. 12:321-328; Pal, A., et al (2005) Int J. Oncol. 26:1087-1091), polyethyleneimine (Bonnet M E., et al (2008) Pharm. Res. August 16 Epub ahead of print; Aigner, A. (2006) J. Biomed. Biotechnol. 71659), Arg-Gly-Asp (RGD) peptides (Liu, S. (2006) Mol. Pharm. 3:472-487), and polyamidoamines (Tomalia, D A., et al (2007) Biochem. Soc. Trans. 35:61-67, Yoo, H., et al (1999) Pharm. Res. 16:1799-1804). In some embodiments, an iRNA forms a complex with cyclodextrin for systemic administration. Methods for administration and pharmaceutical compositions of iRNAs and cyclodextrins can be found in U.S. Pat. No. 7,427,605, which is herein incorporated by reference in its entirety.

B. Vector Encoded iRNAs

[0487] In another aspect, iRNA targeting CA2 can be expressed from transcription units inserted into DNA or RNA vectors (see, e.g., Couture, A, et al., TIG. (1996), 12:5-10; Skillern, A., et al., International PCT Publication No. WO 00/22113, Conrad, International PCT Publication No. WO 00/22114, and Conrad, U.S. Pat. No. 6,054,299). Expression can be transient (on the order of hours to weeks) or sustained (weeks to months or longer), depending upon the specific construct used and the target tissue or cell type. These transgenes can be introduced as a linear construct, a circular plasmid, or a viral vector, which can be an integrating or non-integrating vector. The transgene can also be constructed to permit it to be inherited as an extrachromosomal plasmid (Gassmann, et al., Proc. Natl. Acad. Sci. USA (1995) 92:1292).

[0488] The individual strand or strands of an iRNA can be transcribed from a promoter on an expression vector. Where two separate strands are to be expressed to generate, for example, a dsRNA, two separate expression vectors can be co-introduced (e.g., by transfection or infection) into a target cell. Alternatively, each individual strand of a dsRNA can be transcribed by promoters both of which are located on the same expression plasmid. In some embodiments, a dsRNA is expressed as an inverted repeat joined by a linker polynucleotide sequence such that the dsRNA has a stem and loop structure.

[0489] An iRNA expression vector is typically a DNA plasmid or viral vector. An expression vector compatible with eukaryotic cells, e.g., with vertebrate cells, can be used to produce recombinant constructs for the expression of an iRNA as described herein. Eukaryotic cell expression vectors are well known in the art and are available from a number of commercial sources. Typically, such vectors contain convenient restriction sites for insertion of the desired nucleic acid segment. Delivery of iRNA expressing vectors can be systemic, such as by intravenous or intramuscular administration, by administration to target cells ex-planted from the patient followed by reintroduction into the patient, or by any other means that allows for introduction into a desired target cell.

[0490] An iRNA expression plasmid can be transfected into a target cell as a complex with a cationic lipid carrier (e.g., Oligofectamine) or a non-cationic lipid-based carrier (e.g., Transit-TKO™). Multiple lipid transfections for iRNA-mediated knockdowns targeting different regions of a target RNA over a period of a week or more are also contemplated by the disclosure. Successful introduction of vectors into host cells can be monitored using various known methods. For example, transient transfection can be signaled with a reporter, such as a fluorescent marker, such as Green Fluorescent Protein (GFP). Stable transfection of cells ex vivo can be ensured using markers that provide the transfected cell with resistance to specific environmental factors (e.g., antibiotics and drugs), such as hygromycin B resistance.

[0491] Viral vector systems which can be utilized with the methods and compositions described herein include, but are not limited to, (a) adenovirus vectors; (b) retrovirus vectors, including but not limited to lentiviral vectors, moloney murine leukemia virus, etc.; (c) adeno-associated virus vectors; (d) herpes simplex virus vectors; (e) SV40 vectors; (f) polyoma virus vectors; (g) papilloma virus vectors; (h) picornavirus vectors; (i) pox virus vectors such as an orthopox, e.g., vaccinia virus vectors or avipox, e.g. canary pox or fowl pox; and ( ) a helper-dependent or gutless adenovirus. Replication-defective viruses can also be advantageous. Different vectors will or will not become incorporated into the cells' genome. The constructs can include viral sequences for transfection, if desired. Alternatively, the construct may be incorporated into vectors capable of episomal replication, e.g EPV and EBV vectors. Constructs for the recombinant expression of an iRNA will generally require regulatory elements, e.g., promoters, enhancers, etc., to ensure the expression of the iRNA in target cells. Other aspects to consider for vectors and constructs are further described below.

[0492] Vectors useful for the delivery of an iRNA will include regulatory elements (promoter, enhancer, etc.) sufficient for expression of the iRNA in the desired target cell or tissue. The regulatory elements can be chosen to provide either constitutive or regulated/inducible expression.

[0493] Expression of the iRNA can be precisely regulated, for example, by using an inducible regulatory sequence that is sensitive to certain physiological regulators, e.g., circulating glucose levels, or hormones (Docherty et al., 1994, FASEB J. 8:20-24). Such inducible expression systems, suitable for the control of dsRNA expression in cells or in mammals include, for example, regulation by ecdysone, by estrogen, progesterone, tetracycline, chemical inducers of dimerization, and isopropyl-β-D1-thiogalactopyranoside (IPTG). A person skilled in the art would be able to choose the appropriate regulatory/promoter sequence based on the intended use of the iRNA transgene.

[0494] In a specific embodiment, viral vectors that contain nucleic acid sequences encoding an iRNA can be used. For example, a retroviral vector can be used (see Miller et al., Meth. Enzymol. 217:581-599 (1993)). These retroviral vectors contain the components necessary for the correct packaging of the viral genome and integration into the host cell DNA. The nucleic acid sequences encoding an iRNA are cloned into one or more vectors, which facilitates delivery of the nucleic acid into a patient. More detail about retroviral vectors can be found, for example, in Boesen et al., Biotherapy 6:291-302 (1994), which describes the use of a retroviral vector to deliver the mdr1 gene to hematopoietic stem cells in order to make the stem cells more resistant to chemotherapy. Other references illustrating the use of retroviral vectors in gene therapy are: Clowes et al., J. Clin. Invest. 93:644-651 (1994); Kiem et al., Blood 83:1467-1473 (1994); Salmons and Gunzberg, Human Gene Therapy 4:129-141 (1993); and Grossman and Wilson, Curr. Opin. in Genetics and Devel. 3:110-114 (1993). Lentiviral vectors contemplated for use include, for example, the HIV based vectors described in U.S. Pat. Nos. 6,143,520; 5,665,557; and 5,981,276, which are herein incorporated by reference.

[0495] Adenoviruses are also contemplated for use in delivery of iRNAs. Adenoviruses are especially attractive vehicles, e.g., for delivering genes to respiratory epithelia. Adenoviruses naturally infect respiratory epithelia where they cause a mild disease. Other targets for adenovirus-based delivery systems are liver, the central nervous system, endothelial cells, and muscle. Adenoviruses have the advantage of being capable of infecting non-dividing cells. Kozarsky and Wilson, Current Opinion in Genetics and Development 3:499-503 (1993) present a review of adenovirus-based gene therapy. Bout et al., Human Gene Therapy 5:3-10 (1994) demonstrated the use of adenovirus vectors to transfer genes to the respiratory epithelia of rhesus monkeys. Other instances of the use of adenoviruses in gene therapy can be found in Rosenfeld et al., Science 252:431-434 (1991); Rosenfeld et al., Cell 68:143-155 (1992); Mastrangeli et al., J. Clin. Invest. 91:225-234 (1993); PCT Publication WO94/12649; and Wang, et al., Gene Therapy 2775-783 (1995). A suitable AV vector for expressing an iRNA featured in the disclosure, a method for constructing the recombinant AV vector, and a method for delivering the vector into target cells, are described in Xia H et al. (2002), Nat. Biotech. 20: 1006-1010.

[0496] Use of Adeno-associated virus (AAV) vectors is also contemplated (Walsh et al., Proc. Soc. Exp. Biol. Med. 204:289-300 (1993); U.S. Pat. No. 5,436,146). In some embodiments, the iRNA can be expressed as two separate, complementary single-stranded RNA molecules from a recombinant AAV vector having, for example, either the U6 or H1 RNA promoters, or the cytomegalovirus (CMV) promoter. Suitable AAV vectors for expressing the dsRNA featured in the disclosure, methods for constructing the recombinant AV vector, and methods for delivering the vectors into target cells are described in Samulski R et al. (1987), J. Virol. 61: 3096-3101; Fisher K J et al. (1996), J. Virol., 70: 520-532; Samulski R et al. (1989), J. Virol. 63: 3822-3826; U.S. Pat. Nos. 5,252,479; 5,139,941; International Patent Application No. WO 94/13788; and International Patent Application No. WO 93124641, the entire disclosures of which are herein incorporated by reference.

[0497] Another typical viral vector is a pox virus such as a vaccinia virus, for example an attenuated vaccinia such as Modified Virus Ankara (MVA) or NYVAC, an avipox such as fowl pox or canary pox.

[0498] The tropism of viral vectors can be modified by pseudotyping the vectors with envelope proteins or other surface antigens from other viruses, or by substituting different viral capsid proteins, as appropriate. For example, lentiviral vectors can be pseudotyped with surface proteins from vesicular stomatitis virus (VSV), rabies, Ebola, Mokola. and the like. AAV vectors can be made to target different cells by engineering the vectors to express different capsid protein serotypes; see, e.g., Rabinowitz J E et al. (2002), J Virol 76:791-801, the entire disclosure of which is herein incorporated by reference.

[0499] The pharmaceutical preparation of a vector can include the vector in an acceptable diluent, or can include a slow release matrix in which the gene delivery vehicle is imbedded. Alternatively, where the complete gene delivery vector can be produced intact from recombinant cells, e.g., retroviral vectors, the pharmaceutical preparation can include one or more cells which produce the gene delivery system.

### VI. Pharmaceutical Compositions Containing iRNA

[0500] In some embodiments, the disclosure provides pharmaceutical compositions containing an iRNA, as described herein, and a pharmaceutically acceptable carrier. The pharmaceutical composition containing the iRNA is useful for treating a disease or disorder related to the expression or activity of CA2 (e.g., glaucoma or conditions associated with glaucoma). Such pharmaceutical compositions are formulated based on the mode of delivery. In some embodiments, compositions can be formulated for localized delivery, e.g., by intraocular delivery (e.g., intravitreal administration, e.g., intravitreal injection; transscleral administration, e.g., transscleral injection; subconjunctival administration, e.g., subconjunctival injection; retrobulbar administration, e.g., retrobulbar injection; intracameral administration, e.g., intracameral injection; or subretinal administration, e.g., subretinal injection). In other embodiments, compositions can be formulated for topical delivery. In another example, compositions can be formulated for systemic administration via parenteral delivery, e.g., by intravenous (IV) delivery. In some embodiments, a composition provided herein (e.g., a composition comprising a GalNAc conjugate or an LNP formulation) is formulated for intravenous delivery.

[0501] The pharmaceutical compositions featured herein are administered in a dosage sufficient to inhibit expression of CA2. In general, a suitable dose of iRNA will be in the range of 0.01 to 200.0 milligrams per kilogram body weight of the recipient per day. The pharmaceutical composition may be administered once daily, or the iRNA may be administered as two, three, or more sub-doses at appropriate intervals throughout the day or even using continuous infusion or delivery through a controlled release formulation. In that case, the iRNA contained in each sub-dose must be correspondingly smaller in order to achieve the total daily dosage. The dosage unit can also be compounded for delivery over several days, e.g., using a conventional sustained release formulation which provides sustained release of the iRNA over a several day period. Sustained release formulations are well known in the art and are particularly useful for delivery of agents at a particular site, such as can be used with the agents of the present disclosure. In this embodiment, the dosage unit contains a corresponding multiple of the daily dose.

[0502] The effect of a single dose on CA2 levels can be long lasting, such that subsequent doses are administered at not more than 3, 4, or 5-day intervals, or at not more than 1, 2, 3, 4, 12, 24, or 36-week intervals.

[0503] The skilled artisan will appreciate that certain factors may influence the dosage and timing required to effectively treat a subject, including but not limited to the severity of the disease or disorder, previous treatments, the general health and/or age of the subject, and other diseases present. Moreover, treatment of a subject with a therapeutically effective amount of a composition can include a single treatment or a series of treatments. Estimates of effective dosages and in vivo half-lives for the individual iRNAs encompassed by the disclosure can be made using conventional methodologies or on the basis of in vivo testing using a suitable animal model.

[0504] A suitable animal model, e.g., a mouse or a cynomolgus monkey, e.g., an animal containing a transgene expressing human CA2, can be used to determine the therapeutically effective dose and/or an effective dosage regimen administration of CA2 siRNA.

[0505] The present disclosure also includes pharmaceutical compositions and formulations that include the iRNA compounds featured herein. The pharmaceutical compositions of the present disclosure may be administered in a number of ways depending upon whether local or systemic treatment is desired and upon the area to be treated. Administration may be local (e.g., by intraocular injection), topical (e.g., by an eye drop solution), or parenteral. Parenteral administration includes intravenous, intraarterial, subcutaneous, intraperitoneal or intramuscular injection or infusion; subdermal, e.g., via an implanted device; or intracranial, e.g., by intraparenchymal, intrathecal, or intraventricular administration.

[0506] Pharmaceutical compositions and formulations for topical administration may include transdermal patches, ointments, lotions, creams, gels, drops, suppositories, sprays, liquids and powders. Conventional pharmaceutical carriers, aqueous, powder or oily bases, thickeners and the like may be necessary or desirable. Coated condoms, gloves and the like may also be useful. Suitable topical formulations include those in which the iRNAs featured in the disclosure are in admixture with a topical delivery agent such as lipids, liposomes, fatty acids, fatty acid esters, steroids, chelating agents and surfactants. Suitable lipids and liposomes include neutral (e.g., dioleoylphosphatidyl DOPE ethanolamine, dimyristoylphosphatidyl choline DMPC, distearolyphosphatidyl choline) negative (e.g., dimyristoylphosphatidyl glycerol DMPG) and cationic (e.g., dioleoyltetramethylaminopropyl DOTAP and dioleoylphosphatidyl ethanolamine DOTMA). iRNAs featured in the disclosure may be encapsulated within liposomes or may form complexes thereto, in particular to cationic liposomes. Alternatively, iRNAs may be complexed to lipids, in particular to cationic lipids. Suitable fatty acids and esters include but are not limited to arachidonic acid, oleic acid, eicosanoic acid, lauric acid, caprylic acid, capric acid, myristic acid, palmitic acid, stearic acid, linoleic acid, linolenic acid, dicaprate, tricaprate, monoolein, dilaurin, glyceryl 1-monocaprate, 1-dodecylazacycloheptan-2-one, an acylcarnitine, an acylcholine, or a C₁₋₂₀ alkyl ester (e.g., isopropylmyristate IPM), monoglyceride, diglyceride or pharmaceutically acceptable salt thereof. Topical formulations are described in detail in U.S. Pat. No. 6,747,014, which is incorporated herein by reference.

### A. Liposomal Formulations

[0507] There are many organized surfactant structures besides microemulsions that have been studied and used for the formulation of drugs. These include monolayers, micelles, bilayers and vesicles. Vesicles, such as liposomes, have attracted great interest because of their specificity and the duration of action they offer from the standpoint of drug delivery. As used in the present disclosure, the term “liposome” means a vesicle composed of amphiphilic lipids arranged in a spherical bilayer or bilayers.

[0508] Liposomes are unilamellar or multilamellar vesicles which have a membrane formed from a lipophilic material and an aqueous interior. The aqueous portion contains the composition to be delivered. Cationic liposomes possess the advantage of being able to fuse to the cell wall. Non-cationic liposomes, although not able to fuse as efficiently with the cell wall, are taken up by macrophages in vivo.

[0509] In order to traverse intact mammalian skin, lipid vesicles must pass through a series of fine pores, each with a diameter less than 50 nm, under the influence of a suitable transdermal gradient. Therefore, it is desirable to use a liposome which is highly deformable and able to pass through such fine pores.

[0510] Further advantages of liposomes include; liposomes obtained from natural phospholipids are biocompatible and biodegradable; liposomes can incorporate a wide range of water and lipid soluble drugs; liposomes can protect encapsulated drugs in their internal compartments from metabolism and degradation (Rosoff, in Pharmaceutical Dosage Forms, Lieberman, Rieger and Banker (Eds.), 1988, Marcel Dekker, Inc., New York, N.Y., volume 1, p. 245). Important considerations in the preparation of liposome formulations are the lipid surface charge, vesicle size and the aqueous volume of the liposomes.

[0511] Liposomes are useful for the transfer and delivery of active ingredients to the site of action. Because the liposomal membrane is structurally similar to biological membranes, when liposomes are applied to a tissue, the liposomes start to merge with the cellular membranes and as the merging of the liposome and cell progresses, the liposomal contents are emptied into the cell where the active agent may act.

[0512] Liposomal formulations have been the focus of extensive investigation as the mode of delivery for many drugs. There is growing evidence that for topical administration, liposomes present several advantages over other formulations. Such advantages include reduced side-effects related to high systemic absorption of the administered drug, increased accumulation of the administered drug at the desired target, and the ability to administer a wide variety of drugs, both hydrophilic and hydrophobic, into the skin.

[0513] Several reports have detailed the ability of liposomes to deliver agents including high-molecular weight DNA into the skin. Compounds including analgesics, antibodies, hormones and high-molecular weight DNAs have been administered to the skin. The majority of applications resulted in the targeting of the upper epidermis

[0514] Liposomes fall into two broad classes. Cationic liposomes are positively charged liposomes which interact with the negatively charged DNA molecules to form a stable complex. The positively charged DNA/liposome complex binds to the negatively charged cell surface and is internalized in an endosome. Due to the acidic pH within the endosome, the liposomes are ruptured, releasing their contents into the cell cytoplasm (Wang et al., Biochem. Biophys. Res. Commun., 1987, 147, 980-985).

[0515] Liposomes which are pH-sensitive or negatively charged, entrap DNA rather than complex with it. Since both the DNA and the lipid are similarly charged, repulsion rather than complex formation occurs. Nevertheless, some DNA is entrapped within the aqueous interior of these liposomes. pH-sensitive liposomes have been used to deliver DNA encoding the thymidine kinase gene to cell monolayers in culture. Expression of the exogenous gene was detected in the target cells (Zhou et al., Journal of Controlled Release, 1992, 19, 269-274).

[0516] One major type of liposomal composition includes phospholipids other than naturally derived phosphatidylcholine. Neutral liposome compositions, for example, can be formed from dimyristoyl phosphatidylcholine (DMPC) or dipalmitoyl phosphatidylcholine (DPPC). Anionic liposome compositions generally are formed from dimyristoyl phosphatidylglycerol, while anionic fusogenic liposomes are formed primarily from dioleoyl phosphatidylethanolamine (DOPE). Another type of liposomal composition is formed from phosphatidylcholine (PC) such as, for example, soybean PC, and egg PC. Another type is formed from mixtures of phospholipid and/or phosphatidylcholine and/or cholesterol.

[0517] Several studies have assessed the topical delivery of liposomal drug formulations to the skin. Application of liposomes containing interferon to guinea pig skin resulted in a reduction of skin herpes sores while delivery of interferon via other means (e.g., as a solution or as an emulsion) were ineffective (Weiner et al., Journal of Drug Targeting, 1992, 2, 405-410). Further, an additional study tested the efficacy of interferon administered as part of a liposomal formulation to the administration of interferon using an aqueous system, and concluded that the liposomal formulation was superior to aqueous administration (du Plessis et al., Antiviral Research, 1992, 18, 259-265).

[0518] Non-ionic liposomal systems have also been examined to determine their utility in the delivery of drugs to the skin, in particular systems comprising non-ionic surfactant and cholesterol. Non-ionic liposomal formulations comprising Novasome™ I (glyceryl dilaurate/cholesterol/polyoxyethylene-10-stearyl ether) and Novasome™ II (glyceryl distearate/cholesterol/polyoxyethylene-10-stearyl ether) were used to deliver cyclosporin-A into the dermis of mouse skin. Results indicated that such non-ionic liposomal systems were effective in facilitating the deposition of cyclosporin-A into different layers of the skin (Hu et al. S. T. P. Pharma. Sci., 1994, 4, 6, 466).

[0519] Liposomes also include “sterically stabilized” liposomes, a term which, as used herein, refers to liposomes comprising one or more specialized lipids that, when incorporated into liposomes, result in enhanced circulation lifetimes relative to liposomes lacking such specialized lipids. Examples of sterically stabilized liposomes are those in which part of the vesicle-forming lipid portion of the liposome (A) comprises one or more glycolipids, such as monosialoganglioside G_{M1}, or (B) is derivatized with one or more hydrophilic polymers, such as a polyethylene glycol (PEG) moiety. While not wishing to be bound by any particular theory, it is thought in the art that, at least for sterically stabilized liposomes containing gangliosides, sphingomyelin, or PEG-derivatized lipids, the enhanced circulation half-life of these sterically stabilized liposomes derives from a reduced uptake into cells of the reticuloendothelial system (RES) (Allen et al., FEBS Letters, 1987, 223, 42; Wu et al., Cancer Research, 1993, 53, 3765).

[0520] Various liposomes comprising one or more glycolipids are known in the art. Papahadjopoulos et al. (Ann. N.Y. Acad Sci., 1987, 507, 64) reported the ability of monosialoganglioside G_{M1}, galactocerebroside sulfate and phosphatidylinositol to improve blood half-lives of liposomes. These findings were expounded upon by Gabizon et al. (Proc. Natl. Acad. Sci. U.S.A., 1988, 85, 6949). U.S. Pat. No. 4,837,028 and WO 88/04924, both to Allen et al., disclose liposomes comprising (1) sphingomyelin and (2) the ganglioside G_{M1} or a galactocerebroside sulfate ester. U.S. Pat. No. 5,543,152 (Webb et al.) discloses liposomes comprising sphingomyelin. Liposomes comprising 1,2-sn-dimyristoylphosphatidylcholine are disclosed in WO 97/13499 (Lim et al).

[0521] Many liposomes comprising lipids derivatized with one or more hydrophilic polymers, and methods of preparation thereof, are known in the art. Sunamoto et al. (Bull. Chem. Soc. Jpn., 1980, 53, 2778) described liposomes comprising a nonionic detergent, 2C_{1215G}, that contains a PEG moiety. Ilium et al. (FEBS Lett., 1984, 167, 79) noted that hydrophilic coating of polystyrene particles with polymeric glycols results in significantly enhanced blood half-lives. Synthetic phospholipids modified by the attachment of carboxylic groups of polyalkylene glycols (e.g., PEG) are described by Sears (U.S. Pat. Nos. 4,426,330 and 4,534,899). Klibanov et al. (FEBS Lett., 1990, 268, 235) described experiments demonstrating that liposomes comprising phosphatidylethanolamine (PE) derivatized with PEG or PEG stearate have significant increases in blood circulation half-lives. Blume et al. (Biochimica et Biophysica Acta, 1990, 1029, 91) extended such observations to other PEG-derivatized phospholipids, e.g., DSPE-PEG, formed from the combination of distearoylphosphatidylethanolamine (DSPE) and PEG. Liposomes having covalently bound PEG moieties on their external surface are described in European Patent No. EP 0 445 131 B1 and WO 90/04384 to Fisher. Liposome compositions containing 1-20 mole percent of PE derivatized with PEG, and methods of use thereof, are described by Woodle et al. (U.S. Pat. Nos. 5,013,556 and 5,356,633) and Martin et al. (U.S. Pat. No. 5,213,804 and European Patent No. EP 0 496 813 B1). Liposomes comprising a number of other lipid-polymer conjugates are disclosed in WO 91/05545 and U.S. Pat. No. 5,225,212 (both to Martin et al.) and in WO 94/20073 (Zalipsky et al.). Liposomes comprising PEG-modified ceramide lipids are described in WO 96/10391 (Choi et al). U.S. Pat. No. 5,540,935 (Miyazaki et al.) and U.S. Pat. No. 5,556,948 (Tagawa et al.) describe PEG-containing liposomes that can be further derivatized with functional moieties on their surfaces.

[0522] A number of liposomes comprising nucleic acids are known in the art. WO 96/40062 to Thierry et al. discloses methods for encapsulating high molecular weight nucleic acids in liposomes. U.S. Pat. No. 5,264,221 to Tagawa et al. discloses protein-bonded liposomes and asserts that the contents of such liposomes may include a dsRNA. U.S. Pat. No. 5,665,710 to Rahman et al. describes certain methods of encapsulating oligodeoxynucleotides in liposomes. WO 97/04787 to Love et al. discloses liposomes comprising dsRNAs targeted to the raf gene.

[0523] Transfersomes are yet another type of liposomes, and are highly deformable lipid aggregates which are attractive candidates for drug delivery vehicles. Transfersomes may be described as lipid droplets which are so highly deformable that they are easily able to penetrate through pores which are smaller than the droplet. Transfersomes are adaptable to the environment in which they are used, e.g., they are self-optimizing (adaptive to the shape of pores in the skin), self-repairing, frequently reach their targets without fragmenting, and often self-loading. To make transfersomes it is possible to add surface edge-activators, usually surfactants, to a standard liposomal composition. Transfersomes have been used to deliver serum albumin to the skin. The transfersome-mediated delivery of serum albumin has been shown to be as effective as subcutaneous injection of a solution containing serum albumin.

[0524] Surfactants find wide application in formulations such as emulsions (including microemulsions) and liposomes. The most common way of classifying and ranking the properties of the many different types of surfactants, both natural and synthetic, is by the use of the hydrophile/lipophile balance (HLB). The nature of the hydrophilic group (also known as the “head”) provides the most useful means for categorizing the different surfactants used in formulations (Rieger, in Pharmaceutical Dosage Forms, Marcel Dekker, Inc., New York, N.Y., 1988, p. 285).

[0525] If the surfactant molecule is not ionized, it is classified as a nonionic surfactant. Nonionic surfactants find wide application in pharmaceutical and cosmetic products and are usable over a wide range of pH values. In general, their HLB values range from 2 to about 18 depending on their structure. Nonionic surfactants include nonionic esters such as ethylene glycol esters, propylene glycol esters, glyceryl esters, polyglyceryl esters, sorbitan esters, sucrose esters, and ethoxylated esters. Nonionic alkanolamides and ethers such as fatty alcohol ethoxylates, propoxylated alcohols, and ethoxylated/propoxylated block polymers are also included in this class. The polyoxyethylene surfactants are the most popular members of the nonionic surfactant class.

[0526] If the surfactant molecule carries a negative charge when it is dissolved or dispersed in water, the surfactant is classified as anionic. Anionic surfactants include carboxylates such as soaps, acyl lactylates, acyl amides of amino acids, esters of sulfuric acid such as alkyl sulfates and ethoxylated alkyl sulfates, sulfonates such as alkyl benzene sulfonates, acyl isethionates, acyl taurates and sulfosuccinates, and phosphates. The most important members of the anionic surfactant class are the alkyl sulfates and the soaps.

[0527] If the surfactant molecule carries a positive charge when it is dissolved or dispersed in water, the surfactant is classified as cationic. Cationic surfactants include quaternary ammonium salts and ethoxylated amines. The quaternary ammonium salts are the most used members of this class.

[0528] If the surfactant molecule has the ability to carry either a positive or negative charge, the surfactant is classified as amphoteric. Amphoteric surfactants include acrylic acid derivatives, substituted alkylamides, N-alkylbetaines and phosphatides.

[0529] The use of surfactants in drug products, formulations and in emulsions has been reviewed (Rieger, in Pharmaceutical Dosage Forms, Marcel Dekker, Inc., New York, N.Y., 1988, p. 285).

### B. Nucleic Acid Lipid Particles

[0530] In some embodiments, a CA2 dsRNA featured in the disclosure is fully encapsulated in the lipid formulation, e.g., to form a SPLP, pSPLP, SNALP, or other nucleic acid-lipid particle. SNALPs and SPLPs typically contain a cationic lipid, a non-cationic lipid, and a lipid that prevents aggregation of the particle (e.g., a PEG-lipid conjugate). SNALPs and SPLPs are extremely useful for systemic applications, as they exhibit extended circulation lifetimes following intravenous (i.v.) injection and accumulate at distal sites (e.g., sites physically separated from the administration site). SPLPs include “pSPLP,” which include an encapsulated condensing agent-nucleic acid complex as set forth in PCT Publication No. WO 00/03683. The particles of the present disclosure typically have a mean diameter of about 50 nm to about 150 nm, more typically about 60 nm to about 130 nm, more typically about 70 nm to about 110 nm, most typically about 70 nm to about 90 nm, and are substantially nontoxic. In addition, the nucleic acids when present in the nucleic acid-lipid particles of the present disclosure are resistant in aqueous solution to degradation with a nuclease. Nucleic acid-lipid particles and their method of preparation are disclosed in, e.g., U.S. Pat. Nos. 5,976,567, 5,981,501; 6,534,484; 6,586,410; 6,815,432; and PCT Publication No. WO 96/40964.

[0531] In some embodiments, the lipid to drug ratio (mass/mass ratio) (e.g., lipid to dsRNA ratio) will be in the range of from about 1:1 to about 50:1, from about 1:1 to about 25:1, from about 3:1 to about 15:1, from about 4:1 to about 10:1, from about 5:1 to about 9:1, or about 6:1 to about 9:1.

[0532] The cationic lipid may be, for example, N,N-dioleyl-N,N-dimethylammonium chloride (DODAC), N,N-distearyl-N,N-dimethylammonium bromide (DDAB), N—(I-(2,3-dioleoyloxy)propyl)-N,N,N-trimethylammonium chloride (DOTAP), N—(I-(2,3-dioleyloxy)propyl)-N,N,N-trimethylammonium chloride (DOTMA), N,N-dimethyl-2,3-dioleyloxy)propylamine (DODMA), 1,2-DiLinoleyloxy-N,N-dimethylaminopropane (DLinDMA), 1,2-Dilinolenyloxy-N,N-dimethylaminopropane (DLenDMA), 1,2-Dilinoleylcarbamoyloxy-3-dimethylaminopropane (DLin-C-DAP), 1,2-Dilinoleyoxy-3-(dimethylamino)acetoxypropane (DLin-DAC), 1,2-Dilinoleyoxy-3-morpholinopropane (DLin-MA), 1,2-Dilinoleoyl-3-dimethylaminopropane (DLinDAP), 1,2-Dilinoleylthio-3-dimethylaminopropane (DLin-S-DMA), 1-Linoleoyl-2-linoleyloxy-3-dimethylaminopropane (DLin-2-DMAP), 1,2-Dilinoleyloxy-3-trimethylaminopropane chloride salt (DLin-TMA·Cl), 1,2-Dilinoleoyl-3-trimethylaminopropane chloride salt (DLin-TAP·Cl), 1,2-Dilinoleyloxy-3-(N-methylpiperazino)propane (DLin-MPZ), or 3-(N,N-Dilinoleylamino)-1,2-propanediol (DLinAP), 3-(N,N-Dioleylamino)-1,2-propanedio (DOAP), 1,2-Dilinoleyloxo-3-(2-N,N-dimethylamino)ethoxypropane (DLin-EG-DMA), 1,2-Dilinolenyloxy-N,N-dimethylaminopropane (DLinDMA), 2,2-Dilinoleyl-4-dimethylaminomethyl-[1,3]-dioxolane (DLin-K-DMA) or analogs thereof, (3aR,5s,6aS)—N,N-dimethyl-2,2-di((9Z,12Z)-octadeca-9,12-dienyl)tetrahydro-3aH-cyclopenta[d][1,3]dioxol-5-amine (ALN100), (6Z,9Z,28Z,31Z)-heptatriaconta-6,9,28,31-tetraen-19-yl 4-(dimethylamino)butanoate (MC3), 1,1′-(2-(4-(2-((2-(bis(2-hydroxydodecyl)amino)ethyl)(2-hydroxydodecyl)amino)ethyl)piperazin-1-yl)ethylazanediyl)didodecan-2-ol (Tech G1), or a mixture thereof. The cationic lipid may comprise from about 20 mol % to about 50 mol % or about 40 mol % of the total lipid present in the particle.

[0533] In some embodiments, the compound 2,2-Dilinoleyl-4-dimethylaminoethyl-[1,3]-dioxolane can be used to prepare lipid-siRNA nanoparticles. Synthesis of 2,2-Dilinoleyl-4-dimethylaminoethyl-[1,3]-dioxolane is described in U.S. provisional patent application No. 61/107,998 filed on Oct. 23, 2008, which is herein incorporated by reference.

[0534] In some embodiments, the lipid-siRNA particle includes 40% 2, 2-Dilinoleyl-4-dimethylaminoethyl-[1,3]-dioxolane: 10% DSPC: 40% Cholesterol: 10% PEG-C-DOMG (mole percent) with a particle size of 63.0±20 nm and a 0.027 siRNA/Lipid Ratio.

[0535] The non-cationic lipid may be an anionic lipid or a neutral lipid including, but not limited to, distearoylphosphatidylcholine (DSPC), dioleoylphosphatidylcholine (DOPC), dipalmitoylphosphatidylcholine (DPPC), dioleoylphosphatidylglycerol (DOPG), dipalmitoylphosphatidylglycerol (DPPG), dioleoyl-phosphatidylethanolamine (DOPE), palmitoyloleoylphosphatidylcholine (POPC), palmitoyloleoylphosphatidylethanolamine (POPE), dioleoyl-phosphatidylethanolamine 4-(N-maleimidomethyl)-cyclohexane-1-carboxylate (DOPE-mal), dipalmitoyl phosphatidyl ethanolamine (DPPE), dimyristoylphosphoethanolamine (DMPE), distearoyl-phosphatidyl-ethanolamine (DSPE), 16-O-monomethyl PE, 16-O-dimethyl PE, 18-1-trans PE, 1-stearoyl-2-oleoyl-phosphatidyethanolamine (SOPE), cholesterol, or a mixture thereof. The non-cationic lipid may be from about 5 mol % to about 90 mol %, about 10 mol %, or about 58 mol % if cholesterol is included, of the total lipid present in the particle.

[0536] The conjugated lipid that inhibits aggregation of particles may be, for example, a polyethyleneglycol (PEG)-lipid including, without limitation, a PEG-diacylglycerol (DAG), a PEG-dialkyloxypropyl (DAA), a PEG-phospholipid, a PEG-ceramide (Cer), or a mixture thereof. The PEG-DAA conjugate may be, for example, a PEG-dilauryloxypropyl (Ci₂), a PEG-dimyristyloxypropyl (Ci₄), a PEG-dipalmityloxypropyl (Ci₆), or a PEG-distearyloxypropyl (C]₈). The conjugated lipid that prevents aggregation of particles may be from 0 mol % to about 20 mol % or about 2 mol % of the total lipid present in the particle.

[0537] In some embodiments, the nucleic acid-lipid particle further includes cholesterol at, e.g., about 10 mol % to about 60 mol % or about 48 mol % of the total lipid present in the particle.

[0538] In some embodiments, the iRNA is formulated in a lipid nanoparticle (LNP).

### LNP01

[0539] In some embodiments, the lipidoid ND98·4HCl (MW 1487) (see U.S. patent application Ser. No. 12/056,230, filed Mar. 26, 2008, which is herein incorporated by reference), Cholesterol (Sigma-Aldrich), and PEG-Ceramide C16 (Avanti Polar Lipids) can be used to prepare lipid-dsRNA nanoparticles (e.g., LNP01 particles). Stock solutions of each in ethanol can be prepared as follows: ND98, 133 mg/ml; Cholesterol, 25 mg/ml, PEG-Ceramide C16, 100 mg/ml. The ND98, Cholesterol, and PEG-Ceramide C16 stock solutions can then be combined in a, e.g., 42:48:10 molar ratio. The combined lipid solution can be mixed with aqueous dsRNA (e.g., in sodium acetate pH 5) such that the final ethanol concentration is about 35-45% and the final sodium acetate concentration is about 100-300 mM. Lipid-dsRNA nanoparticles typically form spontaneously upon mixing. Depending on the desired particle size distribution, the resultant nanoparticle mixture can be extruded through a polycarbonate membrane (e.g., 100 nm cut-off) using, for example, a thermobarrel extruder, such as Lipex Extruder (Northern Lipids, Inc). In some cases, the extrusion step can be omitted. Ethanol removal and simultaneous buffer exchange can be accomplished by, for example, dialysis or tangential flow filtration. Buffer can be exchanged with, for example, phosphate buffered saline (PBS) at about pH 7, e.g., about pH 6.9, about pH 7.0, about pH 7.1, about pH 7.2, about pH 7.3, or about pH 7.4.

[chemical structure]

[0540] LNP01 formulations are described, e.g., in International Application Publication No. WO 2008/042973, which is hereby incorporated by reference.

[0541] Additional exemplary lipid-dsRNA formulations are provided in the following Table 1.

TABLE 1
Exemplary lipid formulations

| | | cationic lipid/non-cationic |
|---|---|---|
| | | lipid/cholesterol/PEG-lipid conjugate |
| | Cationic Lipid | Lipid:siRNA ratio |
| SNALP | 1,2-Dilinolenyloxy-N,N- | DLinDMA/DPPC/Cholesterol/PEG- |
| | dimethylaminopropane (DLinDMA) | cDMA |
| | | (57.1/7.1/34.4/1.4) |
| | | lipid:siRNA ~7:1 |
| S-XTC | 2,2-Dilinoleyl-4-dimethylaminoethyl- | XTC/DPPC/Cholesterol/PEG-cDMA |
| | [1,3]-dioxolane (XTC) | 57.1/7.1/34.4/1.4 |
| | | lipid:siRNA ~7:1 |
| LNP05 | 2,2-Dilinoleyl-4-dimethylaminoethyl- | XTC/DSPC/Cholesterol/PEG-DMG |
| | [1,3]-dioxolane (XTC) | 57.5/7.5/31.5/3.5 |
| | | lipid:siRNA ~6:1 |
| LNP06 | 2,2-Dilinoleyl-4-dimethylaminoethyl- | XTC/DSPC/Cholesterol/PEG-DMG |
| | [1,3]-dioxolane (XTC) | 57.5/7.5/31.5/3.5 |
| | | lipid:siRNA ~11:1 |
| LNP07 | 2,2-Dilinoleyl-4-dimethylaminoethyl- | XTC/DSPC/Cholesterol/PEG-DMG |
| | [1,3]-dioxolane (XTC) | 60/7.5/31/1.5, |
| | | lipid:siRNA ~6:1 |
| LNP08 | 2,2-Dilinoleyl-4-dimethylaminoethyl- | XTC/DSPC/Cholesterol/PEG-DMG |
| | [1,3]-dioxolane (XTC) | 60/7.5/31/1.5, |
| | | lipid:siRNA ~11:1 |
| LNP09 | 2,2-Dilinoleyl-4-dimethylaminoethyl- | XTC/DSPC/Cholesterol/PEG-DMG |
| | [1,3]-dioxolane (XTC) | 50/10/38.5/1.5 |
| | | Lipid:siRNA 10:1 |
| LNP10 | (3aR,5s,6aS)-N,N-dimethyl-2,2- | ALN100/DSPC/Cholesterol/PEG-DMG |
| | di((9Z,12Z)-octadeca-9,12- | 50/10/38.5/1.5 |
| | dienyl)tetrahydro-3aH- | Lipid:siRNA 10:1 |
| | cyclopenta[d][1,3]dioxol-5-amine | |
| | (ALN100) | |
| LNP11 | (6Z,9Z,28Z,31Z)-heptatriaconta- | MC-3/DSPC/Cholesterol/PEG-DMG |
| | 6,9,28,31-tetraen-19-yl 4- | 50/10/38.5/1.5 |
| | (dimethylamino)butanoate (MC3) | Lipid:siRNA 10:1 |
| LNP12 | 1,1′-(2-(4-(2-((2-(bis(2- | C12-200/DSPC/Cholesterol/PEG-DMG |
| | hydroxydodecyl)amino)ethyl)(2- | 50/10/38.5/1.5 |
| | hydroxydodecyl)amino)ethyl)piperazin- | Lipid:siRNA 10:1 |
| | 1-yl)ethylazanediyl)didodecan-2-ol | |
| | (C12-200) | |
| LNP13 | XTC | XTC/DSPC/Chol/PEG-DMG |
| | | 50/10/38.5/1.5 |
| | | Lipid:siRNA: 33:1 |
| LNP14 | MC3 | MC3/DSPC/Chol/PEG-DMG |
| | | 40/15/40/5 |
| | | Lipid:siRNA: 11:1 |
| LNP15 | MC3 | MC3/DSPC/Chol/PEG-DSG/GalNAc- |
| | | PEG-DSG |
| | | 50/10/35/4.5/0.5 |
| | | Lipid:siRNA: 11:1 |
| LNP16 | MC3 | MC3/DSPC/Chol/PEG-DMG |
| | | 50/10/38.5/1.5 |
| | | Lipid:siRNA: 7:1 |
| LNP17 | MC3 | MC3/DSPC/Chol/PEG-DSG |
| | | 50/10/38.5/1.5 |
| | | Lipid:siRNA: 10:1 |
| LNP18 | MC3 | MC3/DSPC/Chol/PEG-DMG |
| | | 50/10/38.5/1.5 |
| | | Lipid:siRNA: 12:1 |
| LNP19 | MC3 | MC3/DSPC/Chol/PEG-DMG |
| | | 50/10/35/5 |
| | | Lipid:siRNA: 8:1 |
| LNP20 | MC3 | MC3/DSPC/Chol/PEG-DPG |
| | | 50/10/38.5/1.5 |
| | | Lipid:siRNA: 10:1 |
| LNP21 | C12-200 | C12-200/DSPC/Chol/PEG-DSG |
| | | 50/10/38.5/1.5 |
| | | Lipid:siRNA: 7:1 |
| LNP22 | XTC | XTC/DSPC/Chol/PEG-DSG |
| | | 50/10/38.5/1.5 |
| | | Lipid:siRNA: 10:1 |

DSPC: distearoylphosphatidylcholine
DPPC: dipalmitoylphosphatidylcholine
PEG-DMG: PEG-didimyristoyl glycerol (C14-PEG, or PEG-C14) (PEG with avg mol wt of 2000)
PEG-DSG: PEG-distyryl glycerol (C18-PEG, or PEG-C18) (PEG with avg mol wt of 2000)
PEG-cDMA: PEG-carbamoyl-1,2-dimyristyloxypropylamine (PEG with avg mol wt of 2000)

[0542] SNALP (1,2-Dilinolenyloxy-N,N-dimethylaminopropane (DLinDMA)) comprising formulations are described in International Publication No. WO2009/127060, filed Apr. 15, 2009, which is hereby incorporated by reference.

[0543] XTC comprising formulations are described, e.g, in U.S. Provisional Ser. No. 61/148,366, filed Jan. 29, 2009; U.S. Provisional Ser. No. 61/156,851, filed Mar. 2, 2009; U.S. Provisional Ser. No. 61/185,712, filed Jun. 10, 2009; U.S. Provisional Ser. No. 61/228,373, filed Jul. 24, 2009; U.S. Provisional Ser. No. 61/239,686, filed Sep. 3, 2009, and International Application No. PCT/US2010/022614, filed Jan. 29, 2010, which are hereby incorporated by reference.

[0544] MC3 comprising formulations are described, e.g., in U.S. Provisional Ser. No. 61/244,834, filed Sep. 22, 2009, U.S. Provisional Ser. No. 61/185,800, filed Jun. 10, 2009, and International Application No. PCT/US10/28224, filed Jun. 10, 2010, which are hereby incorporated by reference.

[0545] ALNY-100 comprising formulations are described, e.g., International patent application number PCT/US09/63933, filed on Nov. 10, 2009, which is hereby incorporated by reference.

[0546] C12-200 comprising formulations are described in U.S. Provisional Ser. No. 61/175,770, filed May 5, 2009 and International Application No. PCT/US10/33777, filed May 5, 2010, which are hereby incorporated by reference.

### C. Synthesis of Cationic Lipids

[0547] Any of the compounds, e.g., cationic lipids and the like, used in the nucleic acid-lipid particles featured in the disclosure may be prepared by known organic synthesis techniques. All substituents are as defined below unless indicated otherwise.

[0548] “Alkyl” means a straight chain or branched, noncyclic or cyclic, saturated aliphatic hydrocarbon containing from 1 to 24 carbon atoms. Representative saturated straight chain alkyls include methyl, ethyl, n-propyl, n-butyl, n-pentyl, n-hexyl, and the like; while saturated branched alkyls include isopropyl, sec-butyl, isobutyl, tert-butyl, isopentyl, and the like. Representative saturated cyclic alkyls include cyclopropyl, cyclobutyl, cyclopentyl, cyclohexyl, and the like; while unsaturated cyclic alkyls include cyclopentenyl and cyclohexenyl, and the like.

[0549] “Alkenyl” means an alkyl, as defined above, containing at least one double bond between adjacent carbon atoms. Alkenyls include both cis and trans isomers. Representative straight chain and branched alkenyls include ethylenyl, propylenyl, 1-butenyl, 2-butenyl, isobutylenyl, 1-pentenyl, 2-pentenyl, 3-methyl-1-butenyl, 2-methyl-2-butenyl, 2,3-dimethyl-2-butenyl, and the like.

[0550] “Alkynyl” means any alkyl or alkenyl, as defined above, which additionally contains at least one triple bond between adjacent carbons. Representative straight chain and branched alkynyls include acetylenyl, propynyl, I-butynyl, 2-butynyl, 1-pentynyl, 2-pentynyl, 3-methyl-1 butynyl, and the like.

[0551] “Acyl” means any alkyl, alkenyl, or alkynyl wherein the carbon at the point of attachment is substituted with an oxo group, as defined below. For example, —C(═O)alkyl, —C(═O)alkenyl, and —C(═O)alkynyl are acyl groups.

[0552] “Heterocycle” means a 5- to 7-membered monocyclic, or 7- to 10-membered bicyclic, heterocyclic ring which is either saturated, unsaturated, or aromatic, and which contains from 1 or 2 heteroatoms independently selected from nitrogen, oxygen and sulfur, and wherein the nitrogen and sulfur heteroatoms may be optionally oxidized, and the nitrogen heteroatom may be optionally quaternized, including bicyclic rings in which any of the above heterocycles are fused to a benzene ring. The heterocycle may be attached via any heteroatom or carbon atom. Heterocycles include heteroaryls as defined below. Heterocycles include morpholinyl, pyrrolidinonyl, pyrrolidinyl, piperidinyl, piperizynyl, hydantoinyl, valerolactamyl, oxiranyl, oxetanyl, tetrahydrofuranyl, tetrahydropyranyl, tetrahydropyridinyl, tetrahydroprimidinyl, tetrahydrothiophenyl, tetrahydrothiopyranyl, tetrahydropyrimidinyl, tetrahydrothiophenyl, tetrahydrothiopyranyl, and the like.

[0553] The terms “optionally substituted alkyl”, “optionally substituted alkenyl”, “optionally substituted alkynyl”, “optionally substituted acyl”, and “optionally substituted heterocycle” means that, when substituted, at least one hydrogen atom is replaced with a substituent. In the case of an oxo substituent (═O) two hydrogen atoms are replaced. In this regard, substituents include oxo, halogen, heterocycle, —CN, —OR^{x}, —NR^{x}R^{y}, —NR^{x}C(═O)R^{y}, —NR^{x}SO₂R^{y}, —C(═O)R^{x}, —C(═O)OR, —C(═O)NR^{x}R^{y}, —SOₙR^{x} and —SOₙNR^{x}R^{y}, wherein n is 0, 1 or 2, R^{x} and R^{y} are the same or different and independently hydrogen, alkyl or heterocycle, and each of said alkyl and heterocycle substituents may be further substituted with one or more of oxo, halogen, —OH, —CN, alkyl, —OR^{x}, heterocycle, —NR^{x}R^{y}, —NR^{x}C(═O)R^{y}, —NR^{x}SO₂R^{y}, —C(═O)R^{x}, —C(═O)OR^{x}, —C(═O)NR^{x}R^{y}, —SOₙR^{x} and —SOₙNR^{x}R^{y}.

[0554] “Halogen” means fluoro, chloro, bromo and iodo.

[0555] In some embodiments, the methods featured in the disclosure may require the use of protecting groups. Protecting group methodology is well known to those skilled in the art (see, for example, PROTECTIVE GROUPS IN ORGANIC SYNTHESIS, Green, T. W. et al., Wiley-Interscience, New York City, 1999). Briefly, protecting groups within the context of this disclosure are any group that reduces or eliminates unwanted reactivity of a functional group. A protecting group can be added to a functional group to mask its reactivity during certain reactions and then removed to reveal the original functional group. In some embodiments an “alcohol protecting group” is used. An “alcohol protecting group” is any group which decreases or eliminates unwanted reactivity of an alcohol functional group. Protecting groups can be added and removed using techniques well known in the art.

### Synthesis of Formula A

[0556] In some embodiments, nucleic acid-lipid particles featured in the disclosure are formulated using a cationic lipid of formula A:

[chemical structure]

where R1 and R2 are independently alkyl, alkenyl or alkynyl, each can be optionally substituted, and R3 and R4 are independently lower alkyl or R3 and R4 can be taken together to form an optionally substituted heterocyclic ring. In some embodiments, the cationic lipid is XTC (2,2-Dilinoleyl-4-dimethylaminoethyl-[1,3]-dioxolane). In general, the lipid of formula A above may be made by the following Reaction Schemes 1 or 2, wherein all substituents are as defined above unless indicated otherwise.

[chemical structure]

[0557] Lipid A, where R₁ and R₂ are independently alkyl, alkenyl or alkynyl, each can be optionally substituted, and R₃ and R₄ are independently lower alkyl or R₃ and R₄ can be taken together to form an optionally substituted heterocyclic ring, can be prepared according to Scheme 1. Ketone 1 and bromide 2 can be purchased or prepared according to methods known to those of ordinary skill in the art. Reaction of 1 and 2 yields ketal 3. Treatment of ketal 3 with amine 4 yields lipids of formula A. The lipids of formula A can be converted to the corresponding ammonium salt with an organic salt of formula 5, where X is anion counter ion selected from halogen, hydroxide, phosphate, sulfate, or the like.

[chemical structure]

[0558] Alternatively, the ketone 1 starting material can be prepared according to Scheme 2. Grignard reagent 6 and cyanide 7 can be purchased or prepared according to methods known to those of ordinary skill in the art. Reaction of 6 and 7 yields ketone 1. Conversion of ketone 1 to the corresponding lipids of formula A is as described in Scheme 1.

### Synthesis of MC3

[0559] Preparation of DLin-M-C3-DMA (i.e., (6Z,9Z,28Z,31Z)-heptatriaconta-6,9,28,31-tetraen-19-yl 4-(dimethylamino)butanoate) was as follows. A solution of (6Z,9Z,28Z,31Z)-heptatriaconta-6,9,28,31-tetraen-19-ol (0.53 g), 4-N,N-dimethylaminobutyric acid hydrochloride (0.51 g), 4-N,N-dimethylaminopyridine (0.61 g) and 1-ethyl-3-(3-dimethylaminopropyl)carbodiimide hydrochloride (0.53 g) in dichloromethane (5 mL) was stirred at room temperature overnight. The solution was washed with dilute hydrochloric acid followed by dilute aqueous sodium bicarbonate. The organic fractions were dried over anhydrous magnesium sulphate, filtered and the solvent removed on a rotovap. The residue was passed down a silica gel column (20 g) using a 1-5% methanol/dichloromethane elution gradient. Fractions containing the purified product were combined and the solvent removed, yielding a colorless oil (0.54 g).

### Synthesis of ALNY-100

[0560] Synthesis of ketal 519 [ALNY-100] was performed using the following scheme 3:

[chemical structure]

### Synthesis of 515

[0561] To a stirred suspension of LiAlH4 (3.74 g, 0.09852 mol) in 200 ml anhydrous THF in a two neck RBF (1 L), was added a solution of 5514 (10 g, 0.04926 mol) in 70 mL of THF slowly at 0° C. under nitrogen atmosphere. After complete addition, reaction mixture was warmed to room temperature and then heated to reflux for 4 h. Progress of the reaction was monitored by TLC. After completion of reaction (by TLC) the mixture was cooled to 0° C. and quenched with careful addition of saturated Na2SO4 solution. Reaction mixture was stirred for 4 h at room temperature and filtered off. Residue was washed well with THF The filtrate and washings were mixed and diluted with 400 mL dioxane and 26 mL conc. HCl and stirred for 20 minutes at room temperature. The volatilities were stripped off under vacuum to furnish the hydrochloride salt of 515 as a white solid. Yield: 7.12 g 1H-NMR (DMSO, 400 MHz): δ=9.34 (broad, 2H), 5.68 (s, 2H), 3.74 (m, 1H), 2.66-2.60 (m, 2H), 2.50-2.45 (m, 5H).

### Synthesis of 516

[0562] To a stirred solution of compound 515 in 100 mL dry DCM in a 250 mL two neck RBF, was added NEt3 (37.2 mL, 0.2669 mol) and cooled to 0° C. under nitrogen atmosphere. After a slow addition of N-(benzyloxy-carbonyloxy)-succinimide (20 g, 0.08007 mol) in 50 mL dry DCM, reaction mixture was allowed to warm to room temperature. After completion of the reaction (2-3 h by TLC) mixture was washed successively with 1N HCl solution (1×100 mL) and saturated NaHCO₃ solution (1×50 mL). The organic layer was then dried over anhyd. Na2SO4 and the solvent was evaporated to give crude material which was purified by silica gel column chromatography to get 516 as sticky mass. Yield: 11 g (89%). 1H-NMR (CDCl3, 400 MHz): δ=7.36-7.27 (m, 5H), 5.69 (s, 2H), 5.12 (s, 2H), 4.96 (br., 1H) 2.74 (s, 3H), 2.60 (m, 2H), 2.30-2.25 (m, 2H). LC-MS [M+H] −232.3 (96.94%).

### Synthesis of 517A and 517B

[0563] The cyclopentene 516 (5 g, 0.02164 mol) was dissolved in a solution of 220 mL acetone and water (10:1) in a single neck 500 mL RBF and to it was added N-methyl morpholine-N-oxide (7.6 g, 0.06492 mol) followed by 4.2 mL of 7.6% solution of OsO4 (0.275 g, 0.00108 mol) in tert-butanol at room temperature. After completion of the reaction (˜3 h), the mixture was quenched with addition of solid Na2SO3 and resulting mixture was stirred for 1.5 h at room temperature. Reaction mixture was diluted with DCM (300 mL) and washed with water (2×100 mL) followed by saturated NaHCO₃ (1×50 mL) solution, water (1×30 mL) and finally with brine (1×50 mL). Organic phase was dried over an·Na2SO4 and solvent was removed in vacuum. Silica gel column chromatographic purification of the crude material was afforded a mixture of diastereomers, which were separated by prep HPLC. Yield: −6 g crude

[0564] 517A—Peak-1 (white solid), 5.13 g (96%). 1H-NMR (DMSO, 400 MHz): δ=7.39-7.31 (m, 5H), 5.04 (s, 2H), 4.78-4.73 (m, 1H), 4.48-4.47 (d, 2H), 3.94-3.93 (m, 2H), 2.71 (s, 3H), 1.72-1.67 (m, 4H). LC-MS—[M+H]−266.3, [M+NH4+]−283.5 present, HPLC-97.86%. Stereochemistry confirmed by X-ray.

### Synthesis of 518

[0565] Using a procedure analogous to that described for the synthesis of compound 505, compound 518 (1.2 g, 41%) was obtained as a colorless oil. 1H-NMR (CDCl3, 400 MHz): δ=7.35-7.33 (m, 4H), 7.30-7.27 (m, 1H), 5.37-5.27 (m, 8H), 5.12 (s, 2H), 4.75 (m, 1H), 4.58-4.57 (m, 2H), 2.78-2.74 (m, 7H), 2.06-2.00 (m, 8H), 1.96-1.91 (m, 2H), 1.62 (m, 4H), 1.48 (m, 2H), 1.37-1.25 (br m, 36H), 0.87 (m, 6H). HPLC-98.65%.

### General Procedure for the Synthesis of Compound 519

[0566] A solution of compound 518 (1 eq) in hexane (15 mL) was added in a drop-wise fashion to an ice-cold solution of LAH in THF (1 M, 2 eq). After complete addition, the mixture was heated at 40° C. over 0.5 h then cooled again on an ice bath. The mixture was carefully hydrolyzed with saturated aqueous Na2SO4 then filtered through celite and reduced to an oil. Column chromatography provided the pure 519 (1.3 g, 68%) which was obtained as a colorless oil. 13C NMR=130.2, 130.1 (×2), 127.9 (×3), 112.3, 79.3, 64.4, 44.7, 38.3, 35.4, 31.5, 29.9 (×2), 29.7, 29.6 (×2), 29.5 (×3), 29.3 (×2), 27.2 (×3), 25.6, 24.5, 23.3, 226, 14.1; Electrospray MS (+ve): Molecular weight for C44H80NO2 (M+H)+ Calc. 654.6, Found 654.6.

[0567] Formulations prepared by either the standard or extrusion-free method can be characterized in similar manners. For example, formulations are typically characterized by visual inspection. They should be whitish translucent solutions free from aggregates or sediment. Particle size and particle size distribution of lipid-nanoparticles can be measured by light scattering using, for example, a Malvern Zetasizer Nano ZS (Malvern, USA). Particles should be about 20-300 nm, such as 40-100 nm in size. The particle size distribution should be unimodal. The total dsRNA concentration in the formulation, as well as the entrapped fraction, is estimated using a dye exclusion assay. A sample of the formulated dsRNA can be incubated with an RNA-binding dye, such as Ribogreen (Molecular Probes) in the presence or absence of a formulation disrupting surfactant, e.g., 0.5% Triton-X100. The total dsRNA in the formulation can be determined by the signal from the sample containing the surfactant, relative to a standard curve. The entrapped fraction is determined by subtracting the “free” dsRNA content (as measured by the signal in the absence of surfactant) from the total dsRNA content. Percent entrapped dsRNA is typically >85%. For SNALP formulation, the particle size is at least 30 nm, at least 40 nm, at least 50 nm, at least 60 nm, at least 70 nm, at least 80 nm, at least 90 nm, at least 100 nm, at least 110 nm, and at least 120 nm. The suitable range is typically about at least 50 nm to about at least 110 nm, about at least 60 nm to about at least 100 nm, or about at least 80 nm to about at least 90 nm.

[0568] Compositions and formulations for oral administration include powders or granules, microparticulates, nanoparticulates, suspensions or solutions in water or non-aqueous media, capsules, gel capsules, sachets, tablets or minitablets. Thickeners, flavoring agents, diluents, emulsifiers, dispersing aids or binders may be desirable. In some embodiments, oral formulations are those in which dsRNAs featured in the disclosure are administered in conjunction with one or more penetration enhancers surfactants and chelators. Suitable surfactants include fatty acids and/or esters or salts thereof, bile acids and/or salts thereof. Suitable bile acids/salts include chenodeoxycholic acid (CDCA) and ursodeoxychenodeoxycholic acid (UDCA), cholic acid, dehydrocholic acid, deoxycholic acid, glucholic acid, glycholic acid, glycodeoxycholic acid, taurocholic acid, taurodeoxycholic acid, sodium tauro-24,25-dihydro-fusidate and sodium glycodihydrofusidate. Suitable fatty acids include arachidonic acid, undecanoic acid, oleic acid, lauric acid, caprylic acid, capric acid, myristic acid, palmitic acid, stearic acid, linoleic acid, linolenic acid, dicaprate, tricaprate, monoolein, dilaurin, glyceryl 1-monocaprate, 1-dodecylazacycloheptan-2-one, an acylcarnitine, an acylcholine, or a monoglyceride, a diglyceride or a pharmaceutically acceptable salt thereof (e.g., sodium). In some embodiments, combinations of penetration enhancers are used, for example, fatty acids/salts in combination with bile acids/salts. One exemplary combination is the sodium salt of lauric acid, capric acid and UDCA. Further penetration enhancers include polyoxyethylene-9-lauryl ether, polyoxyethylene-20-cetyl ether. DsRNAs featured in the disclosure may be delivered orally, in granular form including sprayed dried particles, or complexed to form micro or nanoparticles. DsRNA complexing agents include poly-amino acids; polyimines; polyacrylates; polyalkylacrylates, polyoxethanes, polyalkylcyanoacrylates; cationized gelatins, albumins, starches, acrylates, polyethyleneglycols (PEG) and starches; polyalkylcyanoacrylates; DEAE-derivatized polyimines, pollulans, celluloses and starches. Suitable complexing agents include chitosan, N-trimethylchitosan, poly-L-lysine, polyhistidine, polyornithine, polyspermines, protamine, polyvinylpyridine, polythiodiethylaminomethylethylene P(TDAE), polyaminostyrene (e.g., p-amino), poly(methylcyanoacrylate), poly(ethylcyanoacrylate), poly(butylcyanoacrylate), poly(isobutylcyanoacrylate), poly(isohexylcynaoacrylate), DEAE-methacrylate, DEAE-hexylacrylate, DEAE-acrylamide, DEAE-albumin and DEAE-dextran, polymethylacrylate, polyhexylacrylate, poly(D,L-lactic acid), poly(DL-lactic-co-glycolic acid (PLGA), alginate, and polyethyleneglycol (PEG). Oral formulations for dsRNAs and their preparation are described in detail in U.S. Pat. No. 6,887,906, US Publn. No. 20030027780, and U.S. Pat. No. 6,747,014, each of which is incorporated herein by reference.

[0569] Compositions and formulations for parenteral, intraparenchymal (into the brain), intrathecal, intravitreal, subretinal, transscleral, subconjunctival, retrobulbar, intracameral, intraventricular, or intrahepatic administration may include sterile aqueous solutions which may also contain buffers, diluents and other suitable additives such as, but not limited to, penetration enhancers, carrier compounds and other pharmaceutically acceptable carriers or excipients.

[0570] Pharmaceutical compositions of the present disclosure include, but are not limited to, solutions, emulsions, and liposome-containing formulations. These compositions may be generated from a variety of components that include, but are not limited to, preformed liquids, self-emulsifying solids and self-emulsifying semisolids.

[0571] The pharmaceutical formulations featured in the present disclosure, which may conveniently be presented in unit dosage form, may be prepared according to conventional techniques well known in the pharmaceutical industry. Such techniques include the step of bringing into association the active ingredients with the pharmaceutical carrier(s) or excipient(s). In general, the formulations are prepared by uniformly and intimately bringing into association the active ingredients with liquid carriers or finely divided solid carriers or both, and then, if necessary, shaping the product.

[0572] The compositions featured in the present disclosure may be formulated into any of many possible dosage forms such as, but not limited to, tablets, capsules, gel capsules, liquid syrups, soft gels, suppositories, and enemas. The compositions may also be formulated as suspensions in aqueous, non-aqueous or mixed media. Aqueous suspensions may further contain substances which increase the viscosity of the suspension including, for example, sodium carboxymethylcellulose, sorbitol and/or dextran. The suspension may also contain stabilizers.

### D. Additional Formulations

[0573] i. Emulsions

[0574] The compositions of the present disclosure may be prepared and formulated as emulsions. Emulsions are typically heterogeneous systems of one liquid dispersed in another in the form of droplets usually exceeding 0.1 μm in diameter (see e.g., Ansel's Pharmaceutical Dosage Forms and Drug Delivery Systems, Allen, LV., Popovich N G., and Ansel H C., 2004, Lippincott Williams & Wilkins (8th ed.), New York, NY; Idson, in Pharmaceutical Dosage Forms, Lieberman, Rieger and Banker (Eds.), 1988, Marcel Dekker, Inc., New York, N.Y., volume 1, p. 199; Rosoff, in Pharmaceutical Dosage Forms, Lieberman, Rieger and Banker (Eds.), 1988, Marcel Dekker, Inc., New York, N.Y., Volume 1, p. 245; Block in Pharmaceutical Dosage Forms, Lieberman, Rieger and Banker (Eds.), 1988, Marcel Dekker, Inc., New York, N.Y., volume 2, p. 335; Higuchi et al., in Remington's Pharmaceutical Sciences, Mack Publishing Co., Easton, Pa., 1985, p. 301). Emulsions are often biphasic systems comprising two immiscible liquid phases intimately mixed and dispersed with each other. In general, emulsions may be of either the water-in-oil (w/o) or the oil-in-water (o/w) variety. When an aqueous phase is finely divided into and dispersed as minute droplets into a bulk oily phase, the resulting composition is called a water-in-oil (w/o) emulsion. Alternatively, when an oily phase is finely divided into and dispersed as minute droplets into a bulk aqueous phase, the resulting composition is called an oil-in-water (o/w) emulsion. Emulsions may contain additional components in addition to the dispersed phases, and the active drug which may be present as a solution in either the aqueous phase, oily phase or itself as a separate phase. Pharmaceutical excipients such as emulsifiers, stabilizers, dyes, and anti-oxidants may also be present in emulsions as needed. Pharmaceutical emulsions may also be multiple emulsions that are comprised of more than two phases such as, for example, in the case of oil-in-water-in-oil (o/w/o) and water-in-oil-in-water (w/o/w) emulsions. Such complex formulations often provide certain advantages that simple binary emulsions do not. Multiple emulsions in which individual oil droplets of an o/w emulsion enclose small water droplets constitute a w/o/w emulsion. Likewise, a system of oil droplets enclosed in globules of water stabilized in an oily continuous phase provides an o/w/o emulsion.

[0575] Emulsions are characterized by little or no thermodynamic stability. Often, the dispersed or discontinuous phase of the emulsion is well dispersed into the external or continuous phase and maintained in this form through the means of emulsifiers or the viscosity of the formulation. Either of the phases of the emulsion may be a semisolid or a solid, as is the case of emulsion-style ointment bases and creams. Other means of stabilizing emulsions entail the use of emulsifiers that may be incorporated into either phase of the emulsion. Emulsifiers may broadly be classified into four categories: synthetic surfactants, naturally occurring emulsifiers, absorption bases, and finely dispersed solids (see e.g., Ansel's Pharmaceutical Dosage Forms and Drug Delivery Systems, Allen, LV., Popovich N G., and Ansel H C., 2004, Lippincott Williams & Wilkins (8th ed.), New York, NY; Idson, in Pharmaceutical Dosage Forms, Lieberman, Rieger and Banker (Eds.), 1988, Marcel Dekker, Inc., New York, N.Y., volume 1, p. 199).

[0576] Synthetic surfactants, also known as surface active agents, have found wide applicability in the formulation of emulsions and have been reviewed in the literature (see e.g., Ansel's Pharmaceutical Dosage Forms and Drug Delivery Systems, Allen, LV., Popovich N G., and Ansel H C., 2004, Lippincott Williams & Wilkins (8th ed.), New York, NY; Rieger, in Pharmaceutical Dosage Forms, Lieberman, Rieger and Banker (Eds.), 1988, Marcel Dekker, Inc., New York, N.Y., volume 1, p. 285; Idson, in Pharmaceutical Dosage Forms, Lieberman, Rieger and Banker (Eds.), Marcel Dekker, Inc., New York, N.Y., 1988, volume 1, p. 199). Surfactants are typically amphiphilic and comprise a hydrophilic and a hydrophobic portion. The ratio of the hydrophilic to the hydrophobic nature of the surfactant has been termed the hydrophile/lipophile balance (HLB) and is a valuable tool in categorizing and selecting surfactants in the preparation of formulations. Surfactants may be classified into different classes based on the nature of the hydrophilic group; nonionic, anionic, cationic and amphoteric (see e.g., Ansel's Pharmaceutical Dosage Forms and Drug Delivery Systems, Allen, LV., Popovich N G., and Ansel H C., 2004, Lippincott Williams & Wilkins (8th ed.), New York, NY Rieger, in Pharmaceutical Dosage Forms, Lieberman, Rieger and Banker (Eds.), 1988, Marcel Dekker, Inc., New York, N.Y., volume 1, p. 285).

[0577] Naturally occurring emulsifiers used in emulsion formulations include lanolin, beeswax, phosphatides, lecithin and acacia. Absorption bases possess hydrophilic properties such that they can soak up water to form w/o emulsions yet retain their semisolid consistencies, such as anhydrous lanolin and hydrophilic petrolatum. Finely divided solids have also been used as good emulsifiers especially in combination with surfactants and in viscous preparations. These include polar inorganic solids, such as heavy metal hydroxides, nonswelling clays such as bentonite, attapulgite, hectorite, kaolin, montmorillonite, colloidal aluminum silicate and colloidal magnesium aluminum silicate, pigments and nonpolar solids such as carbon or glyceryl tristearate.

[0578] A large variety of non-emulsifying materials are also included in emulsion formulations and contribute to the properties of emulsions. These include fats, oils, waxes, fatty acids, fatty alcohols, fatty esters, humectants, hydrophilic colloids, preservatives and antioxidants (Block, in Pharmaceutical Dosage Forms, Lieberman, Rieger and Banker (Eds.), 1988, Marcel Dekker, Inc., New York, N.Y., volume 1, p. 335; Idson, in Pharmaceutical Dosage Forms, Lieberman, Rieger and Banker (Eds.), 1988, Marcel Dekker, Inc., New York, N.Y., volume 1, p. 199).

[0579] Hydrophilic colloids or hydrocolloids include naturally occurring gums and synthetic polymers such as polysaccharides (for example, acacia, agar, alginic acid, carrageenan, guar gum, karaya gum, and tragacanth), cellulose derivatives (for example, carboxymethylcellulose and carboxypropylcellulose), and synthetic polymers (for example, carbomers, cellulose ethers, and carboxyvinyl polymers). These disperse or swell in water to form colloidal solutions that stabilize emulsions by forming strong interfacial films around the dispersed-phase droplets and by increasing the viscosity of the external phase.

[0580] Since emulsions often contain a number of ingredients such as carbohydrates, proteins, sterols and phosphatides that may readily support the growth of microbes, these formulations often incorporate preservatives. Commonly used preservatives included in emulsion formulations include methyl paraben, propyl paraben, quaternary ammonium salts, benzalkonium chloride, esters of p-hydroxybenzoic acid, and boric acid. Antioxidants are also commonly added to emulsion formulations to prevent deterioration of the formulation. Antioxidants used may be free radical scavengers such as tocopherols, alkyl gallates, butylated hydroxyanisole, butylated hydroxytoluene, or reducing agents such as ascorbic acid and sodium metabisulfite, and antioxidant synergists such as citric acid, tartaric acid, and lecithin.

[0581] The application of emulsion formulations via dermatological, oral and parenteral routes and methods for their manufacture have been reviewed in the literature (see e.g., Ansel's Pharmaceutical Dosage Forms and Drug Delivery Systems, Allen, LV., Popovich N G., and Ansel H C., 2004, Lippincott Williams & Wilkins (8th ed.), New York, NY; Idson, in Pharmaceutical Dosage Forms, Lieberman, Rieger and Banker (Eds.), 1988, Marcel Dekker, Inc., New York, N.Y., volume 1, p. 199). Emulsion formulations for oral delivery have been very widely used because of ease of formulation, as well as efficacy from an absorption and bioavailability standpoint (see e.g., Ansel's Pharmaceutical Dosage Forms and Drug Delivery Systems, Allen, LV., Popovich N G., and Ansel H C., 2004, Lippincott Williams & Wilkins (8th ed.), New York, NY; Rosoff, in Pharmaceutical Dosage Forms, Lieberman, Rieger and Banker (Eds.), 1988, Marcel Dekker, Inc., New York, N.Y., volume 1, p. 245; Idson, in Pharmaceutical Dosage Forms, Lieberman, Rieger and Banker (Eds.), 1988, Marcel Dekker, Inc., New York, N.Y., volume 1, p. 199). Mineral-oil base laxatives, oil-soluble vitamins and high fat nutritive preparations are among the materials that have commonly been administered orally as o/w emulsions.

ii. Microemulsions

[0582] In some embodiments of the present disclosure, the compositions of iRNAs and nucleic acids are formulated as microemulsions. A microemulsion may be defined as a system of water, oil and amphiphile which is a single optically isotropic and thermodynamically stable liquid solution (see e.g., Ansel's Pharmaceutical Dosage Forms and Drug Delivery Systems, Allen, LV., Popovich N G., and Ansel H C., 2004, Lippincott Williams & Wilkins (8th ed.), New York, NY; Rosoff, in Pharmaceutical Dosage Forms, Lieberman, Rieger and Banker (Eds.), 1988, Marcel Dekker, Inc., New York, N.Y., volume 1, p. 245). Typically, microemulsions are systems that are prepared by first dispersing an oil in an aqueous surfactant solution and then adding a sufficient amount of a fourth component, generally an intermediate chain-length alcohol to form a transparent system. Therefore, microemulsions have also been described as thermodynamically stable, isotopically clear dispersions of two immiscible liquids that are stabilized by interfacial films of surface-active molecules (Leung and Shah, in: Controlled Release of Drugs: Polymers and Aggregate Systems, Rosoff, M., Ed., 1989, VCH Publishers, New York, pages 185-215). Microemulsions commonly are prepared via a combination of three to five components that include oil, water, surfactant, cosurfactant and electrolyte. Whether the microemulsion is of the water-in-oil (w/o) or an oil-in-water (o/w) type is dependent on the properties of the oil and surfactant used and on the structure and geometric packing of the polar heads and hydrocarbon tails of the surfactant molecules (Schott, in Remington's Pharmaceutical Sciences, Mack Publishing Co., Easton, Pa., 1985, p. 271).

[0583] The phenomenological approach utilizing phase diagrams has been extensively studied and has yielded a comprehensive knowledge, to one skilled in the art, of how to formulate microemulsions (see e.g., Ansel's Pharmaceutical Dosage Forms and Drug Delivery Systems, Allen, LV., Popovich N G., and Ansel H C., 2004, Lippincott Williams & Wilkins (8th ed.), New York, NY, Rosoff, in Pharmaceutical Dosage Forms, Lieberman, Rieger and Banker (Eds.), 1988, Marcel Dekker, Inc., New York, N Y., volume 1, p. 245; Block, in Pharmaceutical Dosage Forms, Lieberman, Rieger and Banker (Eds.), 1988, Marcel Dekker, Inc., New York, N.Y., volume 1, p. 335). Compared to conventional emulsions, microemulsions offer the advantage of solubilizing water-insoluble drugs in a formulation of thermodynamically stable droplets that are formed spontaneously.

[0584] Surfactants used in the preparation of microemulsions include, but are not limited to, ionic surfactants, non-ionic surfactants, Brij 96, polyoxyethylene oleyl ethers, polyglycerol fatty acid esters, tetraglycerol monolaurate (ML310), tetraglycerol monooleate (MO310), hexaglycerol monooleate (PO310), hexaglycerol pentaoleate (PO500), decaglycerol monocaprate (MCA750), decaglycerol monooleate (MO750), decaglycerol sequioleate (SO750), decaglycerol decaoleate (DAO750), alone or in combination with cosurfactants. The cosurfactant, usually a short-chain alcohol such as ethanol, 1-propanol, and I-butanol, serves to increase the interfacial fluidity by penetrating into the surfactant film and consequently creating a disordered film because of the void space generated among surfactant molecules. Microemulsions may, however, be prepared without the use of cosurfactants and alcohol-free self-emulsifying microemulsion systems are known in the art. The aqueous phase may typically be, but is not limited to, water, an aqueous solution of the drug, glycerol, PEG300, PEG400, polyglycerols, propylene glycols, and derivatives of ethylene glycol. The oil phase may include, but is not limited to, materials such as Captex 300, Captex 355, Capmul MCM, fatty acid esters, medium chain (C8-C12) mono, di, and tri-glycerides, polyoxyethylated glyceryl fatty acid esters, fatty alcohols, polyglycolized glycerides, saturated polyglycolized C8-C10 glycerides, vegetable oils and silicone oil.

[0585] Microemulsions are particularly of interest from the standpoint of drug solubilization and the enhanced absorption of drugs. Lipid based microemulsions (both o/w and w/o) have been proposed to enhance the oral bioavailability of drugs, including peptides (see e.g., U.S. Pat. Nos. 6,191,105; 7,063,860; 7,070,802; 7,157,099; Constantinides et al., Pharmaceutical Research, 1994, 11, 1385-1390; Ritschel, Meth. Find Exp. Clin. Pharmacol., 1993, 13, 205). Microemulsions afford advantages of improved drug solubilization, protection of drug from enzymatic hydrolysis, possible enhancement of drug absorption due to surfactant-induced alterations in membrane fluidity and permeability, ease of preparation, ease of oral administration over solid dosage forms, improved clinical potency, and decreased toxicity (see e.g., U.S. Pat. Nos. 6,191,105; 7,063,860; 7,070,802; 7,157,099; Constantinides et al., Pharmaceutical Research, 1994, 11, 1385; Ho et al., J. Pharm. Sci., 1996, 85, 138-143). Often microemulsions may form spontaneously when their components are brought together at ambient temperature. This may be particularly advantageous when formulating thermolabile drugs, peptides or iRNAs. Microemulsions have also been effective in the transdermal delivery of active components in both cosmetic and pharmaceutical applications. It is expected that the microemulsion compositions and formulations of the present disclosure will facilitate the increased systemic absorption of iRNAs and nucleic acids from the gastrointestinal tract, as well as improve the local cellular uptake of iRNAs and nucleic acids.

[0586] Microemulsions of the present disclosure may also contain additional components and additives such as sorbitan monostearate (Grill 3), Labrasol, and penetration enhancers to improve the properties of the formulation and to enhance the absorption of the iRNAs and nucleic acids of the present disclosure. Penetration enhancers used in the microemulsions of the present disclosure may be classified as belonging to one of five broad categories—surfactants, fatty acids, bile salts, chelating agents, and non-chelating non-surfactants (Lee et al., Critical Reviews in Therapeutic Drug Carrier Systems, 1991, p. 92). Each of these classes has been discussed above.

iii. Penetration Enhancers

[0587] In some embodiments, the present disclosure employs various penetration enhancers to effect the efficient delivery of nucleic acids, particularly iRNAs, to the skin of animals. Most drugs are present in solution in both ionized and nonionized forms. However, usually only lipid soluble or lipophilic drugs readily cross cell membranes. It has been discovered that even non-lipophilic drugs may cross cell membranes if the membrane to be crossed is treated with a penetration enhancer. In addition to aiding the diffusion of non-lipophilic drugs across cell membranes, penetration enhancers also enhance the permeability of lipophilic drugs.

[0588] Penetration enhancers may be classified as belonging to one of five broad categories, i.e., surfactants, fatty acids, bile salts, chelating agents, and non-chelating non-surfactants (see e.g., Malmsten, M. Surfactants and polymers in drug delivery, Informa Health Care, New York, NY, 2002; Lee et al., Critical Reviews in Therapeutic Drug Carrier Systems, 1991, p. 92). Each of the above-mentioned classes of penetration enhancers are described below in greater detail.

[0589] Surfactants: In connection with the present disclosure, surfactants (or “surface-active agents”) are chemical entities which, when dissolved in an aqueous solution, reduce the surface tension of the solution or the interfacial tension between the aqueous solution and another liquid, with the result that absorption of iRNAs through the mucosa is enhanced. In addition to bile salts and fatty acids, these penetration enhancers include, for example, sodium lauryl sulfate, polyoxyethylene-9-lauryl ether and polyoxyethylene-20-cetyl ether) (see e.g., Malmsten, M. Surfactants and polymers in drug delivery, Informa Health Care, New York, NY, 2002; Lee et al., Critical Reviews in Therapeutic Drug Carrier Systems, 1991, p. 92); and perfluorochemical emulsions, such as FC-43. Takahashi et al., J. Pharm. Pharmacol., 1988, 40, 252).

[0590] Fatty acids: Various fatty acids and their derivatives which act as penetration enhancers include, for example, oleic acid, lauric acid, capric acid (n-decanoic acid), myristic acid, palmitic acid, stearic acid, linoleic acid, linolenic acid, dicaprate, tricaprate, monoolein (1-monooleoyl-rac-glycerol), dilaurin, caprylic acid, arachidonic acid, glycerol 1-monocaprate, 1-dodecylazacycloheptan-2-one, acylcarnitines, acylcholines, C₁₋₂₀ alkyl esters thereof (e.g., methyl, isopropyl and t-butyl), and mono- and di-glycerides thereof (i.e., oleate, laurate, caprate, myristate, palmitate, stearate, linoleate, etc.) (see e.g., Touitou, E., et al. Enhancement in Drug Delivery, CRC Press, Danvers, M A, 2006; Lee et al., Critical Reviews in Therapeutic Drug Carrier Systems, 1991, p. 92; Muranishi, Critical Reviews in Therapeutic Drug Carrier Systems, 1990, 7, 1-33; El Hariri et al., J. Pharm. Pharmacol., 1992, 44, 651-654).

[0591] Bile salts: The physiological role of bile includes the facilitation of dispersion and absorption of lipids and fat-soluble vitamins (see e.g., Malmsten, M. Surfactants and polymers in drug delivery, Informa Health Care, New York, NY, 2002; Brunton, Chapter 38 in: Goodman & Gilman's The Pharmacological Basis of Therapeutics, 9th Ed., Hardman et al Eds., McGraw-Hill, New York, 1996, pp. 934-935). Various natural bile salts, and their synthetic derivatives, act as penetration enhancers. Thus, the term “bile salts” includes any of the naturally occurring components of bile as well as any of their synthetic derivatives. Suitable bile salts include, for example, cholic acid (or its pharmaceutically acceptable sodium salt, sodium cholate), dehydrocholic acid (sodium dehydrocholate), deoxycholic acid (sodium deoxycholate), glucholic acid (sodium glucholate), glycholic acid (sodium glycocholate), glycodeoxycholic acid (sodium glycodeoxycholate), taurocholic acid (sodium taurocholate), taurodeoxycholic acid (sodium taurodeoxycholate), chenodeoxycholic acid (sodium chenodeoxycholate), ursodeoxycholic acid (UDCA), sodium tauro-24,25-dihydro-fusidate (STDHF), sodium glycodihydrofusidate and polyoxyethylene-9-lauryl ether (POE) (see e.g., Malmsten, M. Surfactants and polymers in drug delivery, Informa Health Care, New York, NY, 2002; Lee et al., Critical Reviews in Therapeutic Drug Carrier Systems, 1991, page 92; Swinyard, Chapter 39 In: Remington's Pharmaceutical Sciences, 18th Ed., Gennaro, ed., Mack Publishing Co., Easton. Pa., 1990, pages 782-783; Muranishi, Critical Reviews in Therapeutic Drug Carrier Systems, 1990, 7, 1-33; Yamamoto et al., J. Pharm. Erp. Ther., 1992, 263, 25; Yamashita et al., J. Pharm. Sci., 1990, 79, 579-583).

[0592] Chelating Agents: Chelating agents, as used in connection with the present disclosure, can be defined as compounds that remove metallic ions from solution by forming complexes therewith, with the result that absorption of iRNAs through the mucosa is enhanced. With regards to their use as penetration enhancers in the present disclosure, chelating agents have the added advantage of also serving as DNase inhibitors, as most characterized DNA nucleases require a divalent metal ion for catalysis and are thus inhibited by chelating agents (Jarrett, J. Chromatogr., 1993, 618, 315-339). Suitable chelating agents include but are not limited to disodium ethylenediaminetetraacetate (EDTA), citric acid, salicylates (e.g., sodium salicylate, 5-methoxysalicylate and homovanilate), N-acyl derivatives of collagen, laureth-9 and N-amino acyl derivatives of β-diketones (enamines)(see e.g., Katdare, A. et al, Excipient development for pharmaceutical, biotechnology, and drug delivery, CRC Press, Danvers, M A, 2006; Lee et al., Critical Reviews in Therapeutic Drug Carrier Systems, 1991, page 92; Muranishi, Critical Reviews in Therapeutic Drug Carrier Systems, 1990, 7, 1-33; Buur et al., J. Control Rel., 1990, 14, 43-51).

[0593] Non-chelating non-surfactants: As used herein, non-chelating non-surfactant penetration enhancing compounds can be defined as compounds that demonstrate insignificant activity as chelating agents or as surfactants but that nonetheless enhance absorption of iRNAs through the alimentary mucosa (see e.g., Muranishi, Critical Reviews in Therapeutic Drug Carrier Systems, 1990, 7, 1-33). This class of penetration enhancers include, for example, unsaturated cyclic ureas, 1-alkyl- and 1-alkenylazacyclo-alkanone derivatives (Lee et al., Critical Reviews in Therapeutic Drug Carrier Systems, 1991, page 92); and non-steroidal anti-inflammatory agents such as diclofenac sodium, indomethacin and phenylbutazone (Yamashita et al., J. Pharm. Pharmacol., 1987, 39, 621-626).

[0594] Agents that enhance uptake of iRNAs at the cellular level may also be added to the pharmaceutical and other compositions of the present disclosure. For example, cationic lipids, such as lipofectin (Junichi et al, U.S. Pat. No. 5,705,188), cationic glycerol derivatives, and polycationic molecules, such as polylysine (Lollo et al., PCT Application WO 97/30731), are also known to enhance the cellular uptake of dsRNAs. Examples of commercially available transfection reagents include, for example Lipofectamine™ (Invitrogen; Carlsbad, CA), Lipofectamine 2000™ (Invitrogen; Carlsbad, CA), 293fectin™ (Invitrogen; Carlsbad, CA), Cellfectin™ (Invitrogen; Carlsbad, CA), DMRIE-C™ (Invitrogen; Carlsbad, CA), FreeStyle™ MAX (Invitrogen; Carlsbad, CA), Lipofectamine™ 2000 CD (Invitrogen; Carlsbad, CA), Lipofectamine™ (Invitrogen; Carlsbad, CA), RNAiMAX (Invitrogen; Carlsbad, CA), Oligofectamine™ (Invitrogen; Carlsbad, CA), Optifect™ (Invitrogen; Carlsbad, CA), X-tremeGENE Q2 Transfection Reagent (Roche; Grenzacherstrasse, Switzerland), DOTAP Liposomal Transfection Reagent (Grenzacherstrasse, Switzerland), DOSPER Liposomal Transfection Reagent (Grenzacherstrasse, Switzerland), or Fugene (Grenzacherstrasse, Switzerland), Transfectam® Reagent (Promega; Madison, WI), TransFast™ Transfection Reagent (Promega; Madison, WI), Tfx™-20 Reagent (Promega; Madison, WI), Tfx™-50 Reagent (Promega; Madison, WI), DreamFect™ (OZ Biosciences, Marseille, France), EcoTransfect (OZ Biosciences; Marseille, France), TransPassa DI Transfection Reagent (New England Biolabs; Ipswich, MA, USA), LyoVec™/LipoGen™ (Invivogen; San Diego, CA, USA), PerFectin Transfection Reagent (Genlantis: San Diego, CA, USA), NeuroPORTER Transfection Reagent (Genlantis; San Diego, CA, USA), GenePORTER Transfection reagent (Genlantis; San Diego, CA, USA), GenePORTER 2 Transfection reagent (Genlantis; San Diego, CA, USA), Cytofectin Transfection Reagent (Genlantis; San Diego, CA, USA), BaculoPORTER Transfection Reagent (Genlantis; San Diego, CA, USA), TroganPORTER™ transfection Reagent (Genlantis, San Diego, CA, USA), RiboFect (Bioline; Taunton, MA, USA), PlasFect (Bioline; Taunton, MA, USA), UniFECTOR (B-Bridge International; Mountain View, CA, USA), SureFECTOR (B-Bridge International, Mountain View, CA, USA), or HiFect™ (B-Bridge International, Mountain View, CA, USA), among others.

[0595] Other agents may be utilized to enhance the penetration of the administered nucleic acids, including glycols such as ethylene glycol and propylene glycol, pyrrols such as 2-pyrrol, azones, and terpenes such as limonene and menthone.

iv. Carriers

[0596] Certain compositions of the present disclosure also incorporate carrier compounds in the formulation. As used herein, “carrier compound” can refer to a nucleic acid, or analog thereof, which is inert (i.e., does not possess biological activity per se) but is recognized as a nucleic acid by in vivo processes that reduce the bioavailability of a nucleic acid having biological activity by, for example, degrading the biologically active nucleic acid or promoting its removal from circulation. The coadministration of a nucleic acid and a carrier compound, typically with an excess of the latter substance, can result in a substantial reduction of the amount of nucleic acid recovered in the liver, kidney or other extracirculatory reservoirs, presumably due to competition between the carrier compound and the nucleic acid for a common receptor. For example, the recovery of a partially phosphorothioate dsRNA in hepatic tissue can be reduced when it is coadministered with polyinosinic acid, dextran sulfate, polycytidic acid or 4-acetamido-4′isothiocyano-stilbene-2,2′-disulfonic acid (Miyao et al., DsRNA Res. Dev., 1995, 5, 115-121; Takakura et al., DsRNA & Nucl. Acid Drug Dev., 1996, 6, 177-183).

v. Excipients

[0597] In contrast to a carrier compound, a pharmaceutical carrier or excipient may comprise, e.g., a pharmaceutically acceptable solvent, suspending agent or any other pharmacologically inert vehicle for delivering one or more nucleic acids to an animal. The excipient may be liquid or solid and is selected, with the planned manner of administration in mind, so as to provide for the desired bulk, consistency, etc., when combined with a nucleic acid and the other components of a given pharmaceutical composition. Typical pharmaceutical carriers include, but are not limited to, binding agents (e.g., pregelatinized maize starch, polyvinylpyrrolidone or hydroxypropyl methylcellulose, etc.); fillers (e.g., lactose and other sugars, microcrystalline cellulose, pectin, gelatin, calcium sulfate, ethyl cellulose, polyacrylates or calcium hydrogen phosphate, etc.); lubricants (e.g., magnesium stearate, talc, silica, colloidal silicon dioxide, stearic acid, metallic stearates, hydrogenated vegetable oils, corn starch, polyethylene glycols, sodium benzoate, sodium acetate, etc.); disintegrants (e.g., starch, sodium starch glycolate, etc.); and wetting agents (e.g., sodium lauryl sulphate, etc).

[0598] Pharmaceutically acceptable organic or inorganic excipients suitable for non-parenteral administration which do not deleteriously react with nucleic acids can also be used to formulate the compositions of the present disclosure. Suitable pharmaceutically acceptable carriers include, but are not limited to, water, salt solutions, alcohols, polyethylene glycols, gelatin, lactose, amylose, magnesium stearate, talc, silicic acid, viscous paraffin, hydroxymethylcellulose, polyvinylpyrrolidone and the like.

[0599] Formulations for topical administration of nucleic acids may include sterile and non-sterile aqueous solutions, non-aqueous solutions in common solvents such as alcohols, or solutions of the nucleic acids in liquid or solid oil bases. The solutions may also contain buffers, diluents and other suitable additives. Pharmaceutically acceptable organic or inorganic excipients suitable for non-parenteral administration which do not deleteriously react with nucleic acids can be used.

[0600] Suitable pharmaceutically acceptable excipients include, but are not limited to, water, salt solutions, alcohol, polyethylene glycols, gelatin, lactose, amylose, magnesium stearate, talc, silicic acid, viscous paraffin, hydroxymethylcellulose, polyvinylpyrrolidone and the like.

vi. Other Components

[0601] The compositions of the present disclosure may additionally contain other adjunct components conventionally found in pharmaceutical compositions, e.g., at their art-established usage levels. Thus, for example, the compositions may contain additional, compatible, pharmaceutically-active materials such as, for example, antipruritics, astringents, local anesthetics or anti-inflammatory agents, or may contain additional materials useful in physically formulating various dosage forms of the compositions of the present disclosure, such as dyes, flavoring agents, preservatives, antioxidants, opacifiers, thickening agents and stabilizers. However, such materials, when added, should not unduly interfere with the biological activities of the components of the compositions of the present disclosure. The formulations can be sterilized and, if desired, mixed with auxiliary agents, e.g., lubricants, preservatives, stabilizers, wetting agents, emulsifiers, salts for influencing osmotic pressure, buffers, colorings, flavorings and/or aromatic substances and the like which do not deleteriously interact with the nucleic acid(s) of the formulation.

[0602] Aqueous suspensions may contain substances that increase the viscosity of the suspension including, for example, sodium carboxymethylcellulose, sorbitol and/or dextran. The suspension may also contain stabilizers.

[0603] In some embodiments, pharmaceutical compositions featured in the disclosure include (a) one or more iRNA compounds and (b) one or more biologic agents which function by a non-RNAi mechanism. Examples of such biologic agents include agents that interfere with an interaction of CA2 and at least one CA2 binding partner.

[0604] Toxicity and therapeutic efficacy of such compounds can be determined by standard pharmaceutical procedures in cell cultures or experimental animals, e.g., for determining the LD50 (the dose lethal to 50% of the population) and the ED50 (the dose therapeutically effective in 50% of the population). The dose ratio between toxic and therapeutic effects is the therapeutic index and it can be expressed as the ratio LD50/ED50. Compounds that exhibit high therapeutic indices are typical.

[0605] The data obtained from cell culture assays and animal studies can be used in formulating a range of dosage for use in humans. The dosage of compositions featured in the disclosure lies generally within a range of circulating concentrations that include the ED50 with little or no toxicity. The dosage may vary within this range depending upon the dosage form employed and the route of administration utilized. For any compound used in the methods featured in the disclosure, the therapeutically effective dose can be estimated initially from cell culture assays. A dose may be formulated in animal models to achieve a circulating plasma concentration range of the compound or, when appropriate, of the polypeptide product of a target sequence (e.g., achieving a decreased concentration of the polypeptide) that includes the IC50 (i.e., the concentration of the test compound which achieves a half-maximal inhibition of symptoms) as determined in cell culture. Such information can be used to more accurately determine useful doses in humans. Levels in plasma may be measured, for example, by high performance liquid chromatography.

[0606] In addition to their administration, as discussed above, the iRNAs featured in the disclosure can be administered in combination with other known agents effective in treatment of diseases or disorders related to CA2 expression (e.g., glaucoma or conditions associated with glaucoma). In any event, the administering physician can adjust the amount and timing of iRNA administration on the basis of results observed using standard measures of efficacy known in the art or described herein.

### VII. Methods of Treating Disorders Related to Expression of CA2

[0607] The present disclosure relates to the use of an iRNA targeting CA2 to inhibit CA2 expression and/or to treat a disease, disorder, or pathological process that is related to CA2 expression (e.g., glaucoma or conditions associated with glaucoma).

[0608] In some aspects, a method of treatment of a disorder related to expression of CA2 is provided, the method comprising administering an iRNA (e.g., a dsRNA) disclosed herein to a subject in need thereof. In some embodiments, the iRNA inhibits (decreases) CA2 expression.

[0609] In some embodiments, the subject is an animal that serves as a model for a disorder related to CA2 expression, e.g., glaucoma or conditions associated with glaucoma.

A. Glaucoma or Conditions Associated with Glaucoma

[0610] In some embodiments, the disorder related to CA2 expression is glaucoma or conditions associated with glaucoma. Non-limiting examples of glaucoma or conditions associated with glaucoma that are treatable using the methods described herein include glaucoma, open-angle glaucoma, angle-closure glaucoma, ocular inflammation, systemic inflammation, anterior uveitis, acute retinal necrosis, Sturge-Weber syndrome, Axenfeld-Rieger syndrome, Marfan syndrome, homocystinuria, Weill-Marchesani syndrome, and autoimmune diseases, such as juvenile rheumatoid arthritis and Marie-Strumpell ankylosing spondylitis.

[0611] Clinical and pathological features of glaucoma or conditions associated with glaucoma include, but are not limited to, intraocular pressure, vision loss, a reduction in visual acuity (e.g., characterized by floating spots, blurriness around the edges or center of field of vision (e.g., scotoma), ocular inflammation, and/or optic nerve damage.

[0612] In some embodiments, the subject with glaucoma or conditions associated with glaucoma is less than 18 years old. In some embodiments, the subject with glaucoma or conditions associated with glaucoma is an adult. In some embodiments, the subject has, or is identified as having, elevated levels of CA mRNA or protein relative to a reference level (e.g., a level of CA2 that is greater than a reference level).

[0613] In some embodiments, the glaucoma or conditions associated with glaucoma is diagnosed using analysis of a sample from the subject (e.g., a ciliary epithelium sample). In some embodiments, the sample is analyzed using a method selected from one or more of: fluorescent in situ hybridization (FISH), immunohistochemistry, CA2 immunoassay, electron microscopy, laser microdissection, and mass spectrometry. In some embodiments, glaucoma or conditions associated with glaucoma is diagnosed using any suitable diagnostic test or technique, e.g., tonometry, pachymetry, evaluation of the retina, gonioscopy, angiography (e.g., fluorescein angiography or indocyanine green angiography), electroretinography, ultrasonography, optical coherence tomography (OCT), computed tomography (CT) and magnetic resonance imaging (MRI), color vision testing, visual field testing, slit-lamp examination, ophthalmoscopy, and physical examination (e.g., to assess visual acuity (e.g., by fundoscopy or optical coherence tomography (OCT)).

### B. Combination Therapies

[0614] In some embodiments, an iRNA (e.g., a dsRNA) disclosed herein is administered in combination with a second therapy (e.g., one or more additional therapies) known to be effective in treating a disorder related to CA2 expression (e.g., glaucoma) or a symptom of such a disorder. The iRNA may be administered before, after, or concurrent with the second therapy. In some embodiments, the iRNA is administered before the second therapy. In some embodiments, the iRNA is administered after the second therapy. In some embodiments, the iRNA is administered concurrent with the second therapy.

[0615] The second therapy may be an additional therapeutic agent. The iRNA and the additional therapeutic agent can be administered in combination in the same composition or the additional therapeutic agent can be administered as part of a separate composition.

[0616] In some embodiments, the second therapy is a non-iRNA therapeutic agent that is effective to treat the disorder or symptoms of the disorder.

[0617] In some embodiments, the iRNA is administered in conjunction with a therapy. Exemplary combination therapies include, but are not limited to, medication to reduce intraocular pressure, laser treatment, surgery or trabeculectomy. In some embodiments, the additional therapeutic agent comprises a prostaglandin analog, a beta blocker, an alpha-adrenergic agonist, a carbonic anhydrase inhibitor, or an anti-CA2 agent.

[0618] In some embodiments, the additional therapeutic is a prostaglandin analog. In some embodiments, the prostaglandin analog comprises Bimatoprost (Lumigan®), Latanoprost (Xalatan®), Tafluprost (Zioptan™), latanoprostene bunod (Vyzulta™) or Travoprost (Travatan Z®).

[0619] In some embodiments, the additional therapeutic agent is a beta blocker. In some embodiments, the beta blocker comprises Betaxolol (Betoptic S®) or Timolol (Betimol®, Timoptic).

[0620] In some embodiments, the additional therapeutic agent is an alpha-adrenergic agonist. In some embodiments, the alpha-adrenergic agonist comprises brimonidine (Alphagan®P) or apraclonidine (Iopidine®).

[0621] In some embodiments, the additional therapeutic agent is a carbonic anhydrase inhibitor. In some embodiments, the carbonic anhydrase inhibitor comprises dorzolamide (Trsopt®), brinzolamide (Azopt®), acetazolamide (Diamox) or methazolamide (Neptazane®).

[0622] In some embodiments, the anti-CA2 agent is an antibody molecule. In some embodiments the antibody is a monoclonal antibody.

### C. Administration Dosages, Routes, and Timing

[0623] A subject (e.g., a human subject, e.g., a patient) can be administered a therapeutic amount of iRNA. The therapeutic amount can be, e.g., 0.05-50 mg/kg.

[0624] In some embodiments, the iRNA is formulated for delivery to a target organ, e.g., to the eye.

[0625] In some embodiments, the iRNA is formulated as a lipid formulation, e.g., an LNP formulation as described herein. In some such embodiments, the therapeutic amount is 0.05-5 mg/kg dsRNA. In some embodiments, the lipid formulation, e.g., LNP formulation, is administered intravenously.

[0626] In some embodiments, the iRNA is in the form of a GalNAc conjugate e.g., as described herein. In some such embodiments, the therapeutic amount is 0.5-50 mg dsRNA. In some embodiments, the e.g., GalNAc conjugate is administered subcutaneously.

[0627] In some embodiments, the iRNA is in the form of a C16 conjugate e.g., as described herein.

[0628] In certain embodiments, subjects can be administered a therapeutic amount of dsRNA, such as about 0.01 mg/kg to about 200 mg/kg. In other embodiments, subjects can be administered a therapeutic amount of dsRNA, such as about 0.01 mg/kg to about 500 mg/kg. In yet other embodiments, subjects can be administered a therapeutic amount of dsRNA of about 500 mg/kg or more

[0629] In some embodiments, the administration is repeated, for example, on a regular basis, such as, daily, biweekly (i.e., every two weeks) for one month, two months, three months, four months, six months or longer. After an initial treatment regimen, the treatments can be administered on a less frequent basis. For example, after administration biweekly for three months, administration can be repeated once per month, for six months or a year or longer.

[0630] In some embodiments, the iRNA agent is administered in two or more doses. In some embodiments, the number or amount of subsequent doses is dependent on the achievement of a desired effect, e.g., to (a) inhibit or reduce intraocular pressure; (b) inhibit or reduce the expression or activity of CA2; (c) decrease the amount of aqueous humor; (d) inhibit or reduce optic nerve damage; or (e) inhibit or reduce retinal ganglion cell death, or the achievement of a therapeutic or prophylactic effect, e.g., reduction or prevention of one or more symptoms associated with the disorder.

[0631] In some embodiments, the iRNA agent is administered according to a schedule. For example, the iRNA agent may be administered once per week, twice per week, three times per week, four times per week, or five times per week. In some embodiments, the schedule involves regularly spaced administrations, e.g., hourly, every four hours, every six hours, every eight hours, every twelve hours, daily, every 2 days, every 3 days, every 4 days, every 5 days, weekly, biweekly, or monthly. In some embodiments, the iRNA agent is administered at the frequency required to achieve a desired effect.

[0632] In some embodiments, the schedule involves closely spaced administrations followed by a longer period of time during which the agent is not administered. For example, the schedule may involve an initial set of doses that are administered in a relatively short period of time (e.g., about every 6 hours, about every 12 hours, about every 24 hours, about every 48 hours, or about every 72 hours) followed by a longer time period (e.g., about 1 week, about 2 weeks, about 3 weeks, about 4 weeks, about 5 weeks, about 6 weeks, about 7 weeks, or about 8 weeks) during which the iRNA agent is not administered. In some embodiments, the iRNA agent is initially administered hourly and is later administered at a longer interval (e.g., daily, weekly, biweekly, or monthly). In some embodiments, the iRNA agent is initially administered daily and is later administered at a longer interval (e.g., weekly, biweekly, or monthly). In certain embodiments, the longer interval increases over time or is determined based on the achievement of a desired effect.

[0633] Before administration of a full dose of the iRNA, patients can be administered a smaller dose, such as a 5% infusion dose, and monitored for adverse effects, such as an allergic reaction, or for elevated lipid levels or blood pressure. In another example, the patient can be monitored for unwanted effects.

### VIII. Methods for Modulating Expression of CA2

[0634] In some aspects, the disclosure provides a method for modulating (e.g., inhibiting or activating) the expression of CA2, e.g., in a cell, in a tissue, or in a subject. In some embodiments, the cell or tissue is ex vivo, in vitro, or in vivo. In some embodiments, the cell or tissue is in the eye (e.g., a ciliary epithelium cell, an optic nerve cell, a trabecular meshwork cell, a Schlemm's canal cell (e.g., including an endothelial cell), a juxtacanalicular tissue cell, a ciliary muscle cell, a retinal cell, an astrocyte, a pericyte, a Müller cell, a ganglion cell (e.g., including a retinal ganglion cell), an endothelial cell, a photoreceptor cell, a retinal blood vessel (e.g., including endothelial cells and vascular smooth muscle cells), episcleral veins or choroid tissue, e.g., a choroid vessel). In some embodiments, the cell or tissue is in a subject (e.g., a mammal, such as, for example, a human). In some embodiments, the subject (e.g., the human) is at risk, or is diagnosed with a disorder related to expression of CA2 expression, as described herein.

[0635] In some embodiments, the method includes contacting the cell with an iRNA as described herein, in an amount effective to decrease the expression of CA2 in the cell. In some embodiments, contacting a cell with an RNAi agent includes contacting a cell in vitro with the RNAi agent or contacting a cell in vivo with the RNAi agent. In some embodiments, the RNAi agent is put into physical contact with the cell by the individual performing the method, or the RNAi agent may be put into a situation that will permit or cause it to subsequently come into contact with the cell. Contacting a cell in vitro may be done, for example, by incubating the cell with the RNAi agent. Contacting a cell in vivo may be done, for example, by injecting the RNAi agent into or near the tissue where the cell is located, or by injecting the RNAi agent into another area, e.g., ocular tissue. For example, the RNAi agent may contain or be coupled to a ligand, e.g., a lipophilic moiety or moieties as described below and further detailed, e.g., in PCT/US2019/031170 which is incorporated herein by reference in its entirety, including the passages therein describing lipophilic moieties, that directs or otherwise stabilizes the RNAi agent at a site of interest. Combinations of in vitro and in vivo methods of contacting are also possible. For example, a cell may also be contacted in vitro with an RNAi agent and subsequently transplanted into a subject.

[0636] The expression of CA2 may be assessed based on the level of expression of CA2 mRNA, CA2 protein, or the level of another parameter functionally linked to the level of expression of CA2. In some embodiments, the expression of CA2 is inhibited by at least 5%, at least 10%, at least 15%, at least 20%, at least 25%, at least 30%, at least 35%, at least 40%, at least 45%, at least 50%, at least 55%, at least 60%, at least 65%, at least 70%, at least 75%, at least 80%, at least 85%, at least 90%, or at least 95%. In some embodiments, the iRNA has an IC₅₀ in the range of 0.001-0.01 nM, 0.001-0.10 nM, 0.001-1.0 nM, 0.001-10 nM, 0.01-0.05 nM, 0.01-0.50 nM, 0.02-0.60 nM, 0.01-1.0 nM, 0.01-1.5 nM, 0.01-10 nM. The IC₅₀ value may be normalized relative to an appropriate control value, e.g., the IC₅₀ of a non-targeting iRNA.

[0637] In some embodiments, the method includes introducing into the cell or tissue an iRNA as described herein and maintaining the cell or tissue for a time sufficient to obtain degradation of the mRNA transcript of CA2, thereby inhibiting the expression of CA2 in the cell or tissue.

[0638] In some embodiments, the method includes administering a composition described herein, e.g., a composition comprising an iRNA that binds CA2, to the mammal such that expression of the target CA2 is decreased, such as for an extended duration, e.g., at least two, three, four days or more, e.g., one week, two weeks, three weeks, or four weeks or longer. In some embodiments, the decrease in expression of CA2 is detectable within 1 hour, 2 hours, 4 hours, 8 hours, 12 hours, or 24 hours of the first administration.

[0639] In some embodiments, the method includes administering a composition as described herein to a mammal such that expression of the target CA2 is increased by e.g., at least 10% compared to an untreated animal. In some embodiments, the activation of CA2 occurs over an extended duration, e.g., at least two, three, four days or more, e.g., one week, two weeks, three weeks, four weeks, or more. Without wishing to be bound by theory, an iRNA can activate CA2 expression by stabilizing the CA2 mRNA transcript, interacting with a promoter in the genome, or inhibiting an inhibitor of CA2 expression.

[0640] The iRNAs useful for the methods and compositions featured in the disclosure specifically target RNAs (primary or processed) of CA2. Compositions and methods for inhibiting the expression of CA2 using iRNAs can be prepared and performed as described elsewhere herein.

[0641] In some embodiments, the method includes administering a composition containing an iRNA, where the iRNA includes a nucleotide sequence that is complementary to at least a part of an RNA transcript of CA2 of the subject, e.g., the mammal, e.g, the human, to be treated. The composition may be administered by any appropriate means known in the art including, but not limited to ocular (e.g., intraocular), topical, and intravenous administration.

[0642] In certain embodiments, the composition is administered intraocularly (e.g., by intravitreal administration, e.g., intravitreal injection; transscleral administration, e.g., transscleral injection; subconjunctival administration, e.g., subconjunctival injection; retrobulbar administration, e.g., retrobulbar injection; intracameral administration, e.g., intracameral injection; or subretinal administration, e.g., subretinal injection. In other embodiments, the composition is administered topically. In other embodiments, the composition is administered by intravenous infusion or injection.

[0643] In certain embodiments, the composition is administered by intravenous infusion or injection. In some such embodiments, the composition comprises a lipid formulated siRNA (e.g., an LNP formulation, such as an LNP11 formulation) for intravenous infusion.

[0644] Unless otherwise defined, all technical and scientific terms used herein have the same meaning as commonly understood by one of ordinary skill in the art to which this disclosure belongs. Although methods and materials similar or equivalent to those described herein can be used in the practice or testing of the iRNAs and methods featured in the disclosure, suitable methods and materials are described below. All publications, patent applications, patents, and other references mentioned herein are incorporated by reference in their entirety. In case of conflict, the present specification, including definitions, will control. In addition, the materials, methods, and examples are illustrative only and not intended to be limiting.

### SPECIFIC EMBODIMENTS

[0645] In an embodiment the disclosure provides a double stranded ribonucleic acid (dsRNA) agent for inhibiting expression of carbonic anhydrase 2 (CA2), wherein the dsRNA agent comprises a sense strand and an antisense strand forming a double stranded region, wherein the sense strand comprises a nucleotide sequence comprising at least 15 contiguous nucleotides, with 0, 1, 2, or 3 mismatches, of a portion of a coding strand of human CA2 and the antisense strand comprises a nucleotide sequence comprising at least 15 contiguous nucleotides, with 0, 1, 2, or 3 mismatches, of the corresponding portion of a non-coding strand of human CA2 such that the sense strand is complementary to the at least 15 contiguous nucleotides in the antisense strand

[0646] In some embodiments the disclosure provides a double stranded ribonucleic acid (dsRNA) agent for inhibiting expression of carbonic anhydrase 2 (CA2), wherein the dsRNA agent comprises a sense strand and an antisense strand forming a double stranded region, wherein the sense strand comprises a nucleotide sequence comprising at least 15 contiguous nucleotides, with 0, 1, 2, or 3 mismatches, of a portion of a coding strand of human CA2 and the antisense strand comprises a nucleotide sequence comprising at least 15 contiguous nucleotides, with 0, 1, 2, or 3 mismatches, of the corresponding portion of a non-coding strand of human CA2 such that the sense strand is complementary to the at least 15 contiguous nucleotides in the antisense strand wherein the dsRNA agent comprises at least one modified nucleotide.

[0647] In some embodiments the coding strand of human CA2 comprises the sequence SEQ ID NO: 1. In some embodiments the non-coding strand of human CA2 comprises the sequence of SEQ ID NO: 2

[0648] In some embodiments the double stranded ribonucleic acid (dsRNA) agent for inhibiting expression of CA2 comprises a sense strand and an antisense strand forming a double stranded region, wherein the antisense strand comprises a nucleotide sequence comprising at least 15 contiguous nucleotides, with 0, 1, 2, or 3 mismatches, of a portion of nucleotide sequence of SEQ ID NO: 2 such that the sense strand is complementary to the at least 15 contiguous nucleotides in the antisense strand.

[0649] In some embodiments the double stranded ribonucleic acid (dsRNA) agent for inhibiting expression of CA2 comprises a sense strand and an antisense strand forming a double stranded region, wherein the sense strand comprises a nucleotide sequence comprising at least 15 contiguous nucleotides, with 0, or 1, 2, or 3 mismatches, of the corresponding portion of the nucleotide sequence of SEQ ID NO: 1.

[0650] In some embodiments the dsRNA agent comprises a sense strand and an antisense strand, wherein the antisense strand comprises a nucleotide sequence comprising at least 17 contiguous nucleotides, with 0, 1, 2, or 3 mismatches, of a portion of nucleotide sequence of SEQ ID NO: 2 such that the sense strand is complementary to the at least 17 contiguous nucleotides in the antisense strand.

[0651] In some embodiments the dsRNA agent comprises a sense strand and an antisense strand, wherein the sense strand comprises a nucleotide sequence comprising at least 17 contiguous nucleotides, with 0, or 1, 2, or 3 mismatches, of the corresponding portion of the nucleotide sequence of SEQ ID NO: 1.

[0652] In some embodiments the dsRNA agent comprises a sense strand and an antisense strand, wherein the antisense strand comprises a nucleotide sequence comprising at least 19 contiguous nucleotides, with 0, 1, 2, or 3 mismatches, of a portion of nucleotide sequence of SEQ ID NO: 2 such that the sense strand is complementary to the at least 19 contiguous nucleotides in the antisense strand.

[0653] In some embodiments the sense strand comprises a nucleotide sequence comprising at least 19 contiguous nucleotides, with 0, 1, 2, or 3 mismatches, of the corresponding portion of the nucleotide sequence of SEQ ID NO: 1.

[0654] In some embodiments the dsRNA agent comprises a sense strand and an antisense strand, wherein the antisense strand comprises a nucleotide sequence comprising at least 21 contiguous nucleotides, with 0, 1, 2, or 3 mismatches, of a portion of nucleotide sequence of SEQ ID NO: 2 such that the sense strand is complementary to the at least 21 contiguous nucleotides in the antisense strand.

[0655] In some embodiments the sense strand of the dsRNA agent comprises a nucleotide sequence comprising at least 21 contiguous nucleotides, with 0, or 1, 2, or 3 mismatches, of the corresponding portion of the nucleotide sequence of SEQ ID NO: 1.

[0656] In some embodiments the portion of the sense strand of the dsRNA agent is a portion within a sense strand in any one of Tables 3-10. In some embodiments the portion of the antisense strand of the dsRNA agent is a portion within an antisense strand in any one of Tables 3-10.

[0657] In some embodiments the antisense strand of the dsRNA agent comprises a nucleotide sequence comprising at least 15 contiguous nucleotides, with 0, 1, 2, or 3 mismatches, from one of the antisense sequences listed in any one of Tables 3-10.

[0658] In some embodiments the sense strand of the dsRNA agent comprises a nucleotide sequence comprising at least 15 contiguous nucleotides, with 0, 1, 2, or 3 mismatches, from a sense sequence listed in any one of Tables 3-10 that corresponds to the antisense sequence.

[0659] In some embodiments the antisense strand of the dsRNA agent comprises a nucleotide sequence comprising at least 17 contiguous nucleotides, with 0, 1, 2, or 3 mismatches, from one of the antisense sequences listed in any one of Tables 3-10.

[0660] In some embodiments the sense strand of the dsRNA agent comprises a nucleotide sequence comprising at least 17 contiguous nucleotides, with 0, 1, 2, or 3 mismatches, from a sense sequence listed in any one of Tables 3-10 that corresponds to the antisense sequence. In some embodiments the antisense strand of the dsRNA agent comprises a nucleotide sequence comprising at least 19 contiguous nucleotides, with 0, 1, 2, or 3 mismatches, from one of the antisense sequences listed in any one of Tables 3-10.

[0661] In some embodiments the sense strand of the dsRNA agent comprises a nucleotide sequence comprising at least 19 contiguous nucleotides, with 0, 1, 2, or 3 mismatches, from a sense sequence listed in any one of Tables 3-10 that corresponds to the antisense sequence.

[0662] In some embodiments the antisense strand of the dsRNA agent comprises a nucleotide sequence comprising at least 21 contiguous nucleotides, with 0, 1, 2, or 3 mismatches, from one of the antisense sequences listed in any one of Tables 3-10.

[0663] In some embodiments the sense strand of the dsRNA agent comprises a nucleotide sequence comprising at least 21 contiguous nucleotides, with 0, 1, 2, or 3 mismatches, from a sense sequence listed in any one of Tables 3-10 that corresponds to the antisense sequence.

[0664] In some embodiments the sense strand of the dsRNA agent is at least 23 nucleotides in length, e.g., 23-30 nucleotides in length.

[0665] In some embodiments at least one of the sense strand and the antisense strand of the dsRNA agent is conjugated to one or more lipophilic moieties.

[0666] In some embodiments the lipophilic moiety is conjugated to one or more positions in the double stranded region of the dsRNA agent. In some embodiments the lipophilic moiety is conjugated via a linker or carrier.

[0667] In some embodiments the lipophilicity of the lipophilic moiety, measured by log Kow, exceeds 0.

[0668] In some embodiments the hydrophobicity of the double-stranded RNAi agent, measured by the unbound fraction in a plasma protein binding assay of the double-stranded RNAi agent, exceeds 0.2.

[0669] In an embodiment the plasma protein binding assay is an electrophoretic mobility shift assay using human serum albumin protein.

[0670] In a particular embodiment the dsRNA agent comprises at least one modified nucleotide.

[0671] In some embodiments no more than five of the sense strand nucleotides and not more than five of the nucleotides of the antisense strand of the dsRNA agent are unmodified nucleotides.

[0672] In some embodiments all of the nucleotides of the sense strand and all of the nucleotides of the antisense strand of the dsRNA agent comprise a modification.

[0673] In some embodiments at least one of the modified nucleotides of the dsRNA agent is selected from the group consisting of a deoxy-nucleotide, a 3′-terminal deoxythimidine (dT) nucleotide, a 2′-O-methyl modified nucleotide, a 2′-fluoro modified nucleotide, a 2′-deoxy-modified nucleotide, a locked nucleotide, an unlocked nucleotide, a conformationally restricted nucleotide, a constrained ethyl nucleotide, an abasic nucleotide, a 2′-amino-modified nucleotide, a 2′-O-allyl-modified nucleotide, 2′-C-alkyl-modified nucleotide, a 2′-methoxyethyl modified nucleotide, a 2′-O-alkyl-modified nucleotide, a morpholino nucleotide, a phosphoramidate, a non-natural base comprising nucleotide, a tetrahydropyran modified nucleotide, a 1,5-anhydrohexitol modified nucleotide, a cyclohexenyl modified nucleotide, a nucleotide comprising a phosphorothioate group, a nucleotide comprising a methylphosphonate group, a nucleotide comprising a 5′-phosphate, a nucleotide comprising a 5′-phosphate mimic, a glycol modified nucleotide, and a 2-O—(N-methylacetamide) modified nucleotide; and combinations thereof.

[0674] In some embodiments no more than five of the sense strand nucleotides and not more than five of the nucleotides of the antisense strand of the dsRNA agent include modifications other than 2′-O-methyl modified nucleotide, a 2′-fluoro modified nucleotide, a 2′-deoxy-modified nucleotide, unlocked nucleic acids (UNA) or glycerol nucleic acid (GNA).

[0675] In some embodiments the dsRNA agent comprises a non-nucleotide spacer (wherein optionally the non-nucleotide spacer comprises a C3-C6 alkyl) between two of the contiguous nucleotides of the sense strand or between two of the contiguous nucleotides of the antisense strand.

[0676] In some embodiments each strand of the dsRNA agent is no more than 30 nucleotides in length.

[0677] In some embodiments at least one strand of the dsRNA agent comprises a 3′ overhang of at least 1 nucleotide.

[0678] In some embodiments at least one strand of the dsRNA agent comprises a 3′ overhang of at least 2 nucleotides.

[0679] In some embodiments the double stranded region of the dsRNA agent is 15-30 nucleotide pairs in length. In some embodiments the double stranded region of the dsRNA agent is 17-23 nucleotide pairs in length. In some embodiments the double stranded region of the dsRNA agent is 17-25 nucleotide pairs in length. In some embodiments the double stranded region of the dsRNA agent is 23-27 nucleotide pairs in length. In some embodiments the double stranded region of the dsRNA agent is 19-21 nucleotide pairs in length. In some embodiments the double stranded region is 21-23 nucleotide pairs in length. In some embodiments the positions in the double stranded region exclude a cleavage site region of the sense strand of the dsRNA agent.

[0680] In some embodiments each strand of the dsRNA agent has 19-30 nucleotides. In some embodiments each strand of the dsRNA agent has 19-23 nucleotides. In some embodiments each strand of the dsRNA agent has 21-23 nucleotides.

[0681] In some embodiments the dsRNA agent comprises at least one phosphorothioate or methylphosphonate internucleotide linkage. In some embodiments the phosphorothioate or methylphosphonate internucleotide linkage is at the 3′-terminus of one strand of the dsRNA agent. In some embodiments the phosphorothioate or methylphosphonate internucleotide linkage is at the 3′-terminus of the antisense strand of the dsRNA agent. In some embodiments the phosphorothioate or methylphosphonate internucleotide linkage is at the 3′-terminus of the sense strand of the dsRNA agent. In some embodiments the phosphorothioate or methylphosphonate internucleotide linkage is at the 5′-terminus of one strand of the dsRNA agent. In some embodiments the phosphorothioate or methylphosphonate internucleotide linkage is at the 5′-terminus of the antisense strand of the dsRNA agent. In some embodiments the phosphorothioate or methylphosphonate internucleotide linkage is at the 5′-terminus of the sense strand of the dsRNA agent. In some embodiments the 5′- and 3′-terminus of one strand of the dsRNA agent comprises a phosphorothioate or methylphosphonate internucleotide linkage.

[0682] In some embodiments the 5′- and 3′-terminus of the antisense strand of the dsRNA agent comprises a phosphorothioate or methylphosphonate internucleotide linkage.

[0683] In some embodiments the base pair at the 1 position of the 5′-end of the antisense strand of the duplex is an AU base pair.

[0684] In some embodiments the sense strand of the dsRNA agent has a total of 21 nucleotides and the antisense strand has a total of 23 nucleotides.

[0685] In some embodiments one or more lipophilic moieties are conjugated to one or more internal positions on at least one strand of the dsRNA agent. In some embodiments one or more lipophilic moieties are conjugated to one or more internal positions on at least one strand of the dsRNA agent via a linker or carrier. In some embodiments the internal positions include all positions except the terminal two positions from each end of at least one strand of the dsRNA agent. In some embodiments the internal positions include all positions except the terminal three positions from each end of the at least one strand of the dsRNA agent. In some embodiments the internal positions exclude a cleavage site region of the sense strand of the dsRNA agent.

[0686] In some embodiments the internal positions include all positions except positions 9-12, counting from the 5′-end of the sense strand of the dsRNA agent.

[0687] In some embodiments the internal positions include all positions except positions 11-13, counting from the 3′-end of the sense strand of the dsRNA agent.

[0688] In some embodiments the internal positions exclude a cleavage site region of the antisense strand of the dsRNA agent.

[0689] In some embodiments the internal positions include all positions except positions 12-14, counting from the 5′-end of the antisense strand of the dsRNA agent.

[0690] In some embodiments the internal positions include all positions except positions 11-13 on the sense strand of the dsRNA agent, counting from the 3′-end, and positions 12-14 on the antisense strand of the dsRNA agent, counting from the 5′-end.

[0691] In some embodiments the lipophilic moieties are conjugated to one or more of the internal positions selected from the group consisting of positions 4-8 and 13-18 on the sense strand, and positions 6-10 and 15-18 on the antisense strand, counting from the 5′end of each strand of the dsRNA agent.

[0692] In some embodiments the lipophilic moieties are conjugated to one or more of the internal positions selected from the group consisting of positions 5, 6, 7, 15, and 17 on the sense strand, and positions 15 and 17 on the antisense strand, counting from the 5′-end of each strand of the dsRNA agent.

[0693] In some embodiments the sense strand is 21 nucleotides in length, the antisense strand is 23 nucleotides in length, and the lipophilic moiety is conjugated to position 21, position 20, position 15, position 1, position 7, position 6, or position 2 of the sense strand or position 16 of the antisense strand of the dsRNA agent.

[0694] In some embodiments the lipophilic moiety is conjugated to position 21, position 20, position 15, position 1, or position 7 of the sense strand of the dsRNA agent.

[0695] In some embodiments the lipophilic moiety is conjugated to position 21, position 20, or position 15 of the sense strand of the dsRNA agent.

[0696] In some embodiments the lipophilic moiety is conjugated to position 20 or position 15 of the sense strand of the dsRNA agent.

[0697] In some embodiments the lipophilic moiety is conjugated to position 16 of the antisense strand of the dsRNA agent.

[0698] In some embodiments the lipophilic moiety is conjugated to position 6, counting from the 5′-end of the sense strand of the dsRNA agent.

[0699] In some embodiments the lipophilic moiety is an aliphatic, alicyclic, or polyalicyclic compound.

[0700] In some embodiments the lipophilic moiety is selected from the group consisting of lipid, cholesterol, retinoic acid, cholic acid, adamantane acetic acid, 1-pyrene butyric acid, dihydrotestosterone, 1,3-bis-O(hexadecyl)glycerol, geranyloxyhexyanol, hexadecylglycerol, borneol, menthol, 1,3-propanediol, heptadecyl group, palmitic acid, myristic acid, O3-(oleoyl)lithocholic acid, O3-(oleoyl)cholenic acid, dimethoxytrityl, or phenoxazine.

[0701] In some embodiments the lipophilic moiety contains a saturated or unsaturated C4-C30 hydrocarbon chain, and an optional functional group selected from the group consisting of hydroxyl, amine, carboxylic acid, sulfonate, phosphate, thiol, azide, and alkyne.

[0702] In some embodiments the lipophilic moiety contains a saturated or unsaturated C6-C18 hydrocarbon chain.

[0703] In some embodiments the lipophilic moiety contains a saturated or unsaturated C16 hydrocarbon chain.

[0704] In some embodiments the lipophilic moiety is conjugated via a carrier that replaces one or more nucleotide(s) in the internal position(s) or the double stranded region.

[0705] In some embodiments the carrier is a cyclic group selected from the group consisting of pyrrolidinyl, pyrazolinyl, pyrazolidinyl, imidazolinyl, imidazolidinyl, piperidinyl, piperazinyl, [1,3]dioxolanyl, oxazolidinyl, isoxazolidinyl, morpholinyl, thiazolidinyl, isothiazolidinyl, quinoxalinyl, pyridazinonyl, tetrahydrofuranyl, and decalinyl; or is an acyclic moiety based on a serinol backbone or a diethanolamine backbone.

[0706] In some embodiments the lipophilic moiety is conjugated to the double-stranded iRNA agent via a linker containing an ether, thioether, urea, carbonate, amine, amide, maleimide-thioether, disulfide, phosphodiester, sulfonamide linkage, a product of a click reaction, or carbamate.

[0707] In some embodiments the lipophilic moiety is conjugated to a nucleobase, sugar moiety, or internucleosidic linkage.

[0708] In some embodiments the lipophilic moiety is conjugated via a bio-cleavable linker selected from the group consisting of DNA, RNA, disulfide, amide, functionalized monosaccharides or oligosaccharides of galactosamine, glucosamine, glucose, galactose, mannose, and combinations thereof.

[0709] In some embodiments the 3′ end of the sense strand of the dsRNA agent is protected via an end cap which is a cyclic group having an amine, said cyclic group being selected from the group consisting of pyrrolidinyl, pyrazolinyl, pyrazolidinyl, imidazolinyl, imidazolidinyl, piperidinyl, piperazinyl, [1,3]dioxolanyl, oxazolidinyl, isoxazolidinyl, morpholinyl, thiazolidinyl, isothiazolidinyl, quinoxalinyl, pyridazinonyl, tetrahydrofuranyl, and decalinyl.

[0710] In some embodiments the dsRNA agent further comprising a targeting ligand, e.g., a ligand that targets an ocular tissue or a liver tissue. In some embodiments the ligand is conjugated to the sense strand of the dsRNA agent. In some embodiments the ligand is conjugated to the 3′ end or the 5′ end of the sense strand of the dsRNA agent. In some embodiments the ligand is conjugated to the 3′ end of the sense strand of the dsRNA agent.

[0711] In some embodiments the dsRNA agent further comprising a ligand that targets an ocular tissue wherein the ocular tissue is ciliary epithelium, an optic nerve, a trabecular meshwork, a juxtacanalicular tissue, a ganglion (e.g., including a retinal ganglion), episcleral veins or a Schlemm's canal (e.g., including an endothelial cell).

[0712] In some embodiments the targeting ligand of the dsRNA agent comprises N-acetylgalactosamine (GalNAc). In some embodiments the targeting ligand of the dsRNA agent is one or more GalNAc conjugates or one or more or GalNAc derivatives. In some embodiments the GalNAc conjugates or one or more GalNAc derivatives are attached through a monovalent linker, or a bivalent, trivalent, or tetravalent branched linker.

[0713] In some embodiments the targeting ligand of the dsRNA agent is

[chemical structure]

[0714] In some embodiments the dsRNA agent is conjugated to the ligand as shown in the following schematic

[chemical structure]

[0715] wherein X is O or S.

[0716] In some embodiments the dsRNA agent further comprises a terminal, chiral modification occurring at the first internucleotide linkage at the 3′ end of the antisense strand, having the linkage phosphorus atom in Sp configuration, a terminal, chiral modification occurring at the first internucleotide linkage at the 5′ end of the antisense strand, having the linkage phosphorus atom in Rp configuration, and a terminal, chiral modification occurring at the first internucleotide linkage at the 5′ end of the sense strand, having the linkage phosphorus atom in either Rp configuration or Sp configuration.

[0717] In some embodiments the dsRNA agent further comprises a terminal, chiral modification occurring at the first and second internucleotide linkages at the 3′ end of the antisense strand, having the linkage phosphorus atom in Sp configuration; a terminal, chiral modification occurring at the first internucleotide linkage at the 5′ end of the antisense strand, having the linkage phosphorus atom in Rp configuration; and a terminal, chiral modification occurring at the first internucleotide linkage at the 5′ end of the sense strand, having the linkage phosphorus atom in either Rp or Sp configuration.

[0718] In some embodiments the dsRNA agent further comprises a terminal, chiral modification occurring at the first, second and third internucleotide linkages at the 3′ end of the antisense strand, having the linkage phosphorus atom in Sp configuration; a terminal, chiral modification occurring at the first internucleotide linkage at the 5′ end of the antisense strand, having the linkage phosphorus atom in Rp configuration; and a terminal, chiral modification occurring at the first internucleotide linkage at the 5′ end of the sense strand, having the linkage phosphorus atom in either Rp or Sp configuration.

[0719] In some embodiments the dsRNA agent further comprises a terminal, chiral modification occurring at the first, and second internucleotide linkages at the 3′ end of the antisense strand, having the linkage phosphorus atom in Sp configuration; a terminal, chiral modification occurring at the third internucleotide linkages at the 3′ end of the antisense strand, having the linkage phosphorus atom in Rp configuration; a terminal, chiral modification occurring at the first internucleotide linkage at the 5′ end of the antisense strand, having the linkage phosphorus atom in Rp configuration; and a terminal, chiral modification occurring at the first internucleotide linkage at the 5′ end of the sense strand, having the linkage phosphorus atom in either Rp or Sp configuration.

[0720] In some embodiments the dsRNA agent further comprises a terminal, chiral modification occurring at the first, and second internucleotide linkages at the 3′ end of the antisense strand, having the linkage phosphorus atom in Sp configuration; a terminal, chiral modification occurring at the first, and second internucleotide linkages at the 5′ end of the antisense strand, having the linkage phosphorus atom in Rp configuration; and a terminal, chiral modification occurring at the first internucleotide linkage at the 5′ end of the sense strand, having the linkage phosphorus atom in either Rp or Sp configuration.

[0721] In some embodiments the dsRNA agent further comprises a phosphate or phosphate mimic at the 5′-end of the antisense strand. In some embodiments the phosphate mimic is a 5′-vinyl phosphonate (VP).

[0722] In some embodiments the disclosure provides a cell containing the dsRNA agent of any one of the preceding embodiments.

[0723] In some embodiments the cell containing the dsRNA agent is a human ocular cell, e.g., (a ciliary epithelium cell, an optic nerve cell, a trabecular meshwork cell, a Schlemm's canal cell (e.g., including an endothelial cell), a juxtacanalicular tissue cell, a ciliary muscle cell, a retinal cell, an astrocyte, a pericyte, a Müller cell, a ganglion cell (e.g., including a retinal ganglion cell), an endothelial cell, a photoreceptor cell, a retinal blood vessel (e.g., including endothelial cells and vascular smooth muscle cells), episcleral veins or choroid tissue, e.g., a choroid vessel) comprising a reduced level of CA2 mRNA or a level of CA2 protein as compared to an otherwise similar untreated cell, wherein optionally the level is reduced by at least 10%, 15%, 20%, 25%, 30%, 35%, 40%, 45%, 50%, 55%, 60%, 65%, 70%, 75%, 80%, 85%, 90%, or 95%.

[0724] In some embodiments the human cell containing the dsRNA agent is produced by a process comprising contacting a human cell with the dsRNA agent of any one of preceding embodiments.

[0725] In some embodiments the disclosure provides a pharmaceutical composition for inhibiting expression of CA2, comprising the dsRNA agent of any one of preceding embodiments.

[0726] In a particular embodiment the disclosure provides a pharmaceutical composition comprising the dsRNA agent of any one of preceding embodiments and a lipid formulation.

[0727] In some embodiments the disclosure provides a method of inhibiting expression of CA2 in a cell, the method comprising:
[0728] (a) contacting the cell with the dsRNA agent of any one of preceding embodiments or a pharmaceutical composition comprising the dsRNA agent of any one of preceding embodiments, and
[0729] (b) maintaining the cell produced in step (a) for a time sufficient to obtain degradation of the mRNA transcript of CA2, thereby inhibiting expression of CA2 in the cell.

[0730] In other embodiments the disclosure provides a method of inhibiting expression of CA2 in a cell, the method comprising:
[0731] (a) contacting the cell with the dsRNA agent of any one of preceding embodiments or a pharmaceutical composition comprising the dsRNA agent of any one of preceding embodiments; and
[0732] (b) maintaining the cell produced in step (a) for a time sufficient to reduce levels of CA2 mRNA, CA2 protein, or both of CA2 mRNA and protein, thereby inhibiting expression of CA2 in the cell.

[0733] In some embodiments the disclosure provides a method of inhibiting expression of CA2 in a cell wherein the cell is within a subject.

[0734] In some embodiments the disclosure provides a method of inhibiting expression of CA2 in a cell, wherein the cell is within a human subject.

[0735] In some embodiments the disclosure provides a method of inhibiting expression of CA2 in a cell wherein the level of CA2 mRNA is inhibited by at least 50%.

[0736] In some embodiments the disclosure provides a method of inhibiting expression of CA2 in a cell wherein the level of CA2 protein is inhibited by at least 50%.

[0737] In some embodiments the disclosure provides a method of inhibiting expression of CA2 in a cell wherein inhibiting expression of CA2 decreases a CA2 protein level in a biological sample (e.g., a ciliary epithelium sample) from the subject by at least 30%, 40%, 50%, 60%, 70%, 80%, 90%, or 95%.

[0738] In particular embodiments the disclosure provides a method of inhibiting expression of CA2 in a cell wherein the subject has been diagnosed with a CA2-associated disorder, e.g., glaucoma.

[0739] In some embodiments the method of inhibiting expression of CA2 in an ocular cell or tissue comprises
[0740] (a) contacting the cell or tissue with a dsRNA agent that binds CA2; and
[0741] (b) maintaining the cell or tissue produced in step (a) for a time sufficient to reduce levels of CA2 mRNA, CA2 protein, or both of CA2 mRNA and protein, thereby inhibiting expression of CA2 in the cell or tissue. In some embodiments the ocular cell or tissue comprises a ciliary epithelium cell, an optic nerve cell, a trabecular meshwork cell, a Schlemm's canal cell (e.g., including an endothelial cell), a juxtacanalicular tissue cell, a ciliary muscle cell, a retinal cell, an astrocyte, a pericyte, a Müller cell, a ganglion cell (e.g., including a retinal ganglion cell), an endothelial cell, a photoreceptor cell, a retinal blood vessel (e.g., including endothelial cells and vascular smooth muscle cells), episcleral veins or choroid tissue, e.g., a choroid vessel.

[0742] In some embodiments the disclosure provides a method of treating a subject diagnosed with a CA2-associated disorder comprising administering to the subject a therapeutically effective amount of the dsRNA agent of any one of preceding embodiments or a pharmaceutical composition thereof, thereby treating the disorder. In some embodiments the disclosure provides a method of treating a subject diagnosed with a CA2-associated disorder wherein the CA2-associated disorder is glaucoma or a glaucoma associated condition.

[0743] In particular embodiments the disclosure provides a method of treating a subject diagnosed with a CA2-associated disorder wherein treating comprises amelioration of at least one sign or symptom of the disorder. In particular embodiments the disclosure provides a method of treating a subject diagnosed with a CA2-associated disorder where treating comprises prevention of progression of the disorder. In some embodiments the treating comprises one or more of (a) inhibiting or reducing intraocular pressure; (b) inhibiting or reducing the expression or activity of CA2; (c) decreasing the amount of aqueous humor; (d) inhibiting or reducing optic nerve damage; (e) inhibiting or reducing retinal ganglion cell death; (f) medication to reduce intraocular pressure; (g) laser treatment; (h) surgery; (i) or trabeculectomy.

[0744] In some embodiments the disclosure provides a method of treating a subject diagnosed with glaucoma wherein at least one sign or symptom of glaucoma comprises a measure of one or more of intraocular pressure, vision loss, optic nerve damage, ocular inflammation, visual acuity, or presence, level, or activity of CA2 (e.g., CA2 gene, CA2 mRNA, or CA2 protein).

[0745] In particular embodiments the disclosure provides a method of treating a subject diagnosed with a CA2-associated disorder wherein the treating results in at least a 30% mean reduction from baseline of CA2 mRNA in a ciliary epithelium cell, an optic nerve cell, a trabecular meshwork cell, a Schlemm's canal cell (e.g., including an endothelial cell), a juxtacanalicular tissue cell, a ciliary muscle cell, retinal pigment epithelium (RPE), a retinal cell, an astrocyte, a pericyte, a Müller cell, a ganglion cell (e.g., including a retinal ganglion cell), an endothelial cell, a photoreceptor cell, a retinal blood vessel (e.g., including endothelial cells and vascular smooth muscle cells), episcleral veins or choroid tissue, e.g., a choroid vessel.

[0746] In some embodiments the disclosure provides a method of treating a subject diagnosed with a CA2-associated disorder wherein the treating results in at least a 60% mean reduction from baseline of CA2 mRNA in the ciliary epithelium cell, optic nerve cell, trabecular meshwork cell, Schlemm's canal cell (e.g., including an endothelial cell), juxtacanalicular tissue cell, ciliary muscle cell, retinal pigment epithelium (RPE), retinal cell, astrocyte, pericyte, Müller cell, ganglion cell (e.g, including retinal ganglion cell), endothelial cell, photoreceptor cell, retinal blood vessel (e.g., including endothelial cells and vascular smooth muscle cells), episcleral veins or choroid tissue, e.g., choroid vessel.

[0747] In other embodiments the disclosure provides a method of treating a subject diagnosed with a CA2-associated disorder wherein the treating results in at least a 90% mean reduction from baseline of CA2 mRNA in the ciliary epithelium cell, optic nerve cell, trabecular meshwork cell, Schlemm's canal cell (e.g., including an endothelial cell), juxtacanalicular tissue cell, ciliary muscle cell, retinal pigment epithelium (RPE), retinal cell, astrocyte, pericyte, Müller cell, ganglion cell (e.g, including retinal ganglion cell), endothelial cell, photoreceptor cell, retinal blood vessel (e.g., including endothelial cells and vascular smooth muscle cells), episcleral veins or choroid tissue, e.g., choroid vessel.

[0748] In some embodiments the disclosure provides a method of treating a subject diagnosed with a CA2-associated disorder wherein after treatment the subject experiences at least an 8-week duration of knockdown following a single dose of dsRNA as assessed by CA2 protein in the ciliary epithelium.

[0749] In particular embodiments the disclosure provides a method of treating a subject diagnosed with a CA2-associated disorder wherein treating results in at least a 12-week duration of knockdown following a single dose of dsRNA as assessed by CA2 protein in the ciliary epithelium.

[0750] In particular embodiments the disclosure provides a method of treating a subject diagnosed with a CA2-associated disorder wherein treating results in at least a 16-week duration of knockdown following a single dose of dsRNA as assessed by CA2 protein in the ciliary epithelium.

[0751] In some embodiments the disclosure provides a method of treating a subject diagnosed with a CA2-associated disorder wherein the subject is human.

[0752] In some embodiments the disclosure provides a method of treating a subject diagnosed with a CA2-associated disorder wherein the dsRNA agent is administered at a dose of about 0.01 mg/kg to about 50 mg/kg. In some embodiments the disclosure provides a method of treating a subject diagnosed with a CA2-associated disorder wherein the dsRNA agent is administered to the subject intraocularly, intravenously, or topically. In some embodiments the intraocular administration comprises intravitreal administration (e.g., intravitreal injection), transscleral administration (e.g., transscleral injection), subconjunctival administration (e.g., subconjunctival injection), retrobulbar administration (e.g., retrobulbar injection), intracameral administration (e.g., intracameral injection), or subretinal administration (e.g., subretinal injection).

[0753] In some embodiments the method of treating a subject diagnosed with a CA2-associated disorder further comprising measuring level of CA2 (e.g., CA2 gene, CA2 mRNA, or CA2 protein) in the subject.

[0754] In some embodiments measuring the level of CA2 in the subject comprises measuring the level of CA2 gene, CA2 protein or CA2 mRNA in a biological sample from the subject (e.g., a ciliary epithelium sample). In some embodiments measuring level of CA2 (e.g., CA2 gene, CA2 mRNA, or CA2 protein) in the subject is performed prior to treatment with the dsRNA agent or the pharmaceutical composition. In other embodiments measuring level of CA2 (e.g., CA2 gene, CA2 mRNA, or CA2 protein) in the subject is performed after treatment with the dsRNA agent or the pharmaceutical composition. In some embodiments upon determination that a subject has a level of CA2 (e.g., CA2 gene, CA2 mRNA, or CA2 protein) that is greater than a reference level, the dsRNA agent or the pharmaceutical composition is administered to the subject. In some embodiments, measuring level of CA2 (e.g., CA2 gene, CA2 mRNA, or CA2 protein) in the subject is performed after treatment with the dsRNA agent or the pharmaceutical composition.

[0755] In some embodiments the disclosure provides a method of treating a subject diagnosed with a CA2-associated disorder further comprising performing a blood test, an imaging test, a tonometry test or a ciliary epithelium biopsy.

[0756] In some embodiments the disclosure provides a method of treating a subject diagnosed with a CA2-associated disorder, the method further comprising administering to the subject an additional agent and/or therapy suitable for treatment or prevention of an CA2-associated disorder. In some embodiments the additional agent and/or therapy comprises one or more of a prostaglandin analog, a beta blocker, an alpha-adrenergic agonist, a carbonic anhydrase inhibitor, or an anti-CA2 agent.

### EXAMPLES

### Example 1. CA2 siRNA

[0757] Nucleic acid sequences provided herein are represented using standard nomenclature. See the abbreviations of Table 2.

TABLE 2
Abbreviations of nucleotide monomers used in nucleic acid sequence representation
It will be understood that these monomers, when present in an oligonucleotide, are mutually
linked by 5′-3′-phosphodiester bonds.

| Abbreviation | Nucleotide(s) |
|---|---|
| A | Adenosine-3′-phosphate |
| Ab | beta-L-adenosine-3′-phosphate |
| Abs | beta-L-adenosine-3-phosphorothioate |
| Af | 2′-fluoroadenosine-3′-phosphate |
| Afs | 2′-fluoroadenosine-3′-phosphorothioate |
| (Ahd) | 2′-O-hexadecyl-adenosine-3′-phosphate |
| (Ahds) | 2′-O-hexadecyl-adenosine-3′-phosphorothioate |
| As | adenosine-3′-phosphorothioate |
| (A2p) | adenosine-2′-phosphate |
| (A2ps) | adenosine-2-phosphorothioate |
| C | cytidine-3′-phosphate |
| Cb | beta-L-cytidine-3′-phosphate |
| Cbs | beta-L-cytidine-3′-phosphorothioate |
| Cf | 2′-fluorocytidine-3′-phosphate |
| Cfs | 2′-fluorocytidine-3′-phosphorothioate |
| (Chd) | 2′-O-hexadecyl-cytidine-3′-phosphate |
| (Chds) | 2′-O-hexadecyl-cytidine-3′-phosphorothioate |
| Cs | cytidine-3′-phosphorothioate |
| (C2p) | cytidine-2′-phosphate |
| (C2ps) | cytidine-2′-phosphorothioate |
| G | guanosine-3′-phosphate |
| Gb | beta-L-guanosine-3-phosphate |
| Gbs | beta-L-guanosine-3′-phosphorothioate |
| Gf | 2′-fluoroguanosine-3′-phosphate |
| Gfs | 2′-fluoroguanosine-3′-phosphorothioate |
| (Ghd) | 2′-O-hexadecyl-guanosine-3′-phosphate |
| (Ghds) | 2′-O-hexadecyl-guanosine-3′-phosphorothioate |
| Gs | guanosine-3′-phosphorothioate |
| (G2p) | guanosine-2′-phosphate |
| (G2ps) | guanosine-2-phosphorothioate |
| T | 5′-methyluridine-3′-phosphate |
| Tb | beta-L-thymidine-3′-phosphate |
| Tbs | beta-L-thymidine-3′-phosphorothioate |
| Tf | 2′-fluoro-S-methyluridine-3′-phosphate |
| Tfs | 2′-fluoro-5-methyluridine-3′-phosphorothioate |
| Tgn | thymidine-glycol nucleic acid (GNA) S-Isomer |
| Agn | adenosine-glycol nucleic acid (GNA) S-Isomer |
| Cgn | cytidine-glycol nucleic acid (GNA) S-Isomer |
| Ggn | guanosine-glycol nucleic acid (GNA) S-Isomer |
| T′s | 5-methyluridine-3′-phosphorothioate |
| U | Uridine-3′-phosphate |
| Ub | beta-L-uridine-3′-phosphate |
| Ubs | beta-L-uridine-3-phosphorothioate |
| Uf | 2′-fluorouridine-3′-phosphate |
| Ufs | 2′-fluorouridine-3′-phosphorothioate |
| (Uhd) | 2′-O-hexadecyl-uridine-3′-phosphate |
| (Uhds) | 2′-O-hexadecyl-uridine-3′-phosphorothioate |
| Us | uridine-3′-phosphorothioate |
| (U2p) | uridine-2-phosphate |
| (U2ps) | uridine-2-phosphorothioate |
| N | any nucleotide (G, A, C, T or U) |
| VP | Vinyl phosphonate |
| a | 2′-O-methyladenosine-3′-phosphate |
| as | 2′-O-methyladenosine-3′-phosphorothioate |
| c | 2′-O-methylcytidine-3′-phosphate |
| cs | 2′-O-methylcytidine-3′-phosphorothioate |
| g | 2′-O-methylguanosine-3′-phosphate |
| gs | 2′-O-methylguanosine-3′-phosphorothioate |
| t | 2′-O-methyl-5-methyluridine-3′-phosphate |
| ts | 2′-O-methyl-5-methyluridine-3′-phosphorothioate |
| u | 2′-O-methyluridine-3′-phosphate |
| us | 2′-O-methyluridine-3′-phosphorothioate |
| dA | 2-deoxyadenosine-3′-phosphate |
| dAs | 2′-deoxyadenosine-3′-phosphorothioate |
| dC | 2-deoxycytidine-3-phosphate |
| dCs | 2′-deoxycytidine-3-phosphorothioate |
| dG | 2′-deoxyguanosine-3′-phosphate |
| dGs | 2-deoxyguanosine-3-phosphorothioate |
| dT | 2′-deoxythymidine |
| dTs | 2′-deoxythymidine-3′-phosphorothioate |
| dU | 2′-deoxyuridine |
| s | phosphorothioate linkage |
| L96¹ | N-[tris(GalNAc-alkyl)-amidodecanoyl)]-4-hydroxyprolinol |
| | Hyp-(GalNAc-alkyl)3 |
| (Aco) | 2′-O-methoxyethyladenosine-3′-phosphate |
| (Aeos) | 2′-O-methoxyethyladenosine-3′-phosphorothicate |
| (Geo) | 2′-O-methoxyethylguanosine-3′-phosphate |
| (Geos) | 2′-O-methoxyethylguanosine-3′-phosphorothicate |
| (Teo) | 2′-O-methoxyethyl-5-methyluridine-3′-phosphate |
| (Teos) | 2′-O-methoxyethyl-5-methyluridine-3′-phosphorothioate |
| (m5Ceo) | 2′-O-methoxyethyl-5-methylcytidine-3′-phosphate |
| (m5Ceos) | 2′-O-methoxyethyl-5-methylcytidine-3′-phosphorothioate |

¹The chemical structure of L96 is as follows:

[chemical structure]

### Experimental Methods

### Bioinformatics

### Transcripts

[0758] siRNAs targeting the human CA2, “carbonic anhydrase 2” (human: NCBI refseqID NM_000067.3; NCBI GeneID: 760) were generated. The human NM_000067.3 REFSEQ mRNA, version 1, has a length of 1562 bases. Pairs of oligos were generated using bioinformatic methods and ranked, and exemplary pairs of oligos are shown in Tables 3 and 4, Tables 7 and 8, and Tables 9 and 10. Modified sequences are presented in Tables 5, 6, 8, and 10. Unmodified sequences are presented in Tables 3, 4, 7, and 9. The oligos in Tables 3, 5, and 9 were designed for C16 modification and the oligos in Tables 4 and 6 were designed for GalNAc modification.

[0759] It is to be understood that, throughout the application, a duplex name without a decimal is equivalent to a duplex name with a decimal which merely references the batch number of the duplex. For example, AD-1560600 is equivalent to AD-1560600.1.

siRNA Synthesis

[0760] siRNAs were synthesized and annealed using routine methods known in the art.

[0761] Briefly, siRNA sequences were synthesized at 1 μmol scale on a Mermade 192 synthesizer (BioAutomation) using the solid support mediated phosphoramidite chemistry. The solid support was controlled pore glass (500 A) loaded with custom GalNAc ligand or universal solid support (AM biochemical). Ancillary synthesis reagents, 2′-F and 2′-O-Methyl RNA and deoxy phosphoramidites were obtained from Thermo-Fisher (Milwaukee, WI) and Hongene (China). 2′F 2′-O-Methyl, GNA (glycol nucleic acids), 5′phosphate and other modifications were introduced using the corresponding phosphoramidites. Synthesis of 3′ GalNAc conjugated single strands was performed on a GalNAc modified CPG support. Custom CPG universal solid support was used for the synthesis of antisense single strands. Coupling time for all phosphoramidites (100 mM in acetonitrile) was 5 minutes employing 5-Ethylthio-1H-tetrazole (ETT) as activator (0.6 M in acetonitrile). Phosphorothioate linkages were generated using a 50 mM solution of 3-((Dimethylamino-methylidene) amino)-3H-1,2,4-dithiazole-3-thione (DDTT, obtained from Chemgenes (Wilmington, MA, USA)) in anhydrous acetonitrile/pyridine (1:1 v/v). Oxidation time was 3 minutes. All sequences were synthesized with final removal of the DMT group (“DMT off”).

[0762] Upon completion of the solid phase synthesis, oligoribonucleotides were cleaved from the solid support and deprotected in sealed 96 deep well plates using 200 μL Aqueous Methylamine reagents at 60° C. for 20 minutes. For sequences containing 2′ ribo residues (2′-OH) that are protected with a tert-butyl dimethyl silyl (TBDMS) group, a second step deprotection was performed using TEA·3HF (triethylamine trihydro fluoride) reagent. To the methylamine deprotection solution, 200 μL of dimethyl sulfoxide (DMSO) and 300 μL TEA·3HF reagent was added and the solution was incubated for additional 20 minutes at 60° C. At the end of cleavage and deprotection step, the synthesis plate was allowed to come to room temperature and was precipitated by addition of 1 mL of acetontile:ethanol mixture (9:1). The plates were cooled at −80° C. for 2 hours, supernatant decanted carefully with the aid of a multi-channel pipette. The oligonucleotide pellet was re-suspended in 20 mM NaOAc buffer and were desalted using a 5 mL HiTrap size exclusion column (GE Healthcare) on an AKTA Purifier System equipped with an A905 autosampler and a Frac 950 fraction collector. Desalted samples were collected in 96-well plates. Samples from each sequence were analyzed by LC-MS to confirm the identity, UV (260 nm) for quantification and a selected set of samples by IEX chromatography to determine purity.

[0763] Annealing of single strands was performed on a Tecan liquid handling robot. Equimolar mixture of sense and antisense single strands were combined and annealed in 96 well plates. After combining the complementary single strands, the 96-well plate was sealed tightly and heated in an oven at 100° C. for 10 minutes and allowed to come slowly to room temperature over a period 2-3 hours. The concentration of each duplex was normalized to 10 μM in 1×PBS and then submitted for in vitro screening assays.

TABLE 3
Unmodified Sense and Antisense Strand Sequences of CA2 dsRNA Agents for
C16 Modification

| | | SEQ | Range in | Antisense | SEQ | Range in |
|---|---|---|---|---|---|---|
| Duplex | Sense Sequence | ID | NM_ | Sequence | ID | NM_ |
| Name | 5′ to 3′ | NO: | 000067.3 | 5′ to 3′ | NO: | 000067.3 |
| AD- | AGAUCGGUGCC | 7 | 32-52 | UGCAGGAAUCGG | 142 | 30-52 |
| 1560600 | GAUUCCUGCA | | | CACCGAUCUGG | | |
| AD- | CGCGACCAUGU | 8 | 69-89 | UAGUGAUGGGAC | 143 | 67-89 |
| 1560617 | CCCAUCACUA | | | AUGGUCGCGCU | | |
| AD- | GUACGGCAAAC | 9 | 93-113 | UGUCCGUUGUGU | 144 | 91-113 |
| 1560622 | ACAACGGACA | | | UUGCCGUACCC | | |
| AD- | CAAACACAACG | 10 | 99-119 | UGCUCAGGUCCG | 145 | 97-119 |
| 1560628 | GACCUGAGCA | | | UUGUGUUUGCC | | |
| AD- | GGACCUGAGCA | 11 | 109-129 | UUUAUGCCAGUG | 146 | 107-129 |
| 1560638 | CUGGCAUAAA | | | CUCAGGUCCGU | | |
| AD- | GAGCACUGGCA | 12 | 115-135 | UAAGUCCUUAUG | 147 | 113-135 |
| 1560644 | UAAGGACUUA | | | CCAGUGCUCAG | | |
| AD- | GUUGACAUCGA | 13 | 166-186 | UGUAUGAGUGUC | 148 | 164-186 |
| 1560655 | CACUCAUACA | | | GAUGUCAACAG | | |
| AD- | ACACUCAUACA | 14 | 176-196 | UAUACUUGGCUG | 149 | 174-196 |
| 1560665 | GCCAAGUAUA | | | UAUGAGUGUCG | | |
| AD- | UACAGCCAAGU | 15 | 183-203 | UAAGGGUCAUAC | 150 | 181-203 |
| 1560672 | AUGACCCUUA | | | UUGGCUGUAUG | | |
| AD- | CAAGUAUGACC | 16 | 189-209 | UUCAGGGAAGGG | 151 | 187-209 |
| 1560678 | CUUCCCUGAA | | | UCAUACUUGGC | | |
| AD- | UGUCUGUUUCC | 17 | 215-235 | UUUGAUCAUAGG | 152 | 213-235 |
| 1560684 | UAUGAUCAAA | | | AAACAGACAGG | | |
| AD- | CCUAUGAUCAA | 18 | 224-244 | UGGAAGUUGCUU | 153 | 222-244 |
| 1560693 | GCAACUUCCA | | | GAUCAUAGGAA | | |
| AD- | CAAGCAACUUC | 19 | 232-252 | UAUCCUCAGGGA | 154 | 230-252 |
| 1560701 | CCUGAGGAUA | | | AGUUGCUUGAU | | |
| AD- | CCCUGAGGAUC | 20 | 242-262 | UAUUGUUGAGGA | 155 | 240-262 |
| 1560711 | CUCAACAAUA | | | UCCUCAGGGAA | | |
| AD- | UCCUCAACAAU | 21 | 251-271 | UAGCAUGACCAU | 156 | 249-271 |
| 1560720 | GGUCAUGCUA | | | UGUUGAGGAUC | | |
| AD- | ACAAUGGUCAU | 22 | 257-277 | UGUUGAAAGCAU | 157 | 255-277 |
| 1560726 | GCUUUCAACA | | | GACCAUUGUUG | | |
| AD- | AUGCUUUCAAC | 23 | 266-286 | UAAACUCCACGU | 158 | 264-286 |
| 1560735 | GUGGAGUUUA | | | UGAAAGCAUGA | | |
| AD- | AACGUGGAGUU | 24 | 274-294 | UGAGUCAUCAAA | 159 | 272-294 |
| 1560745 | UGAUGACUCA | | | CUCCACGUUGA | | |
| AD- | UGAUGACUCUC | 25 | 285-305 | UCUUUGUCCUGA | 160 | 283-305 |
| 1560752 | AGGACAAAGA | | | GAGUCAUCAAA | | |
| AD- | UCUCAGGACAA | 26 | 292-312 | UAGCACUGCUUU | 161 | 290-312 |
| 1560759 | AGCAGUGCUA | | | GUCCUGAGAGU | | |
| AD- | GACAAAGCAGU | 27 | 298-318 | UCCCUUGAGCAC | 162 | 296-318 |
| 1560765 | GCUCAAGGGA | | | UGCUUUGUCCU | | |
| AD- | UGGCACUUACA | 28 | 330-350 | UGAAUCAAUCUG | 163 | 328-350 |
| 1560777 | GAUUGAUUCA | | | UAAGUGCCAUC | | |
| AD- | UUACAGAUUGA | 29 | 336-356 | UGAAACUGAAUC | 164 | 334-356 |
| 1560783 | UUCAGUUUCA | | | AAUCUGUAAGU | | |
| AD- | AUUCAGUUUCA | 30 | 346-366 | UCAGUGAAAGUG | 165 | 344-366 |
| 1560792 | CUUUCACUGA | | | AAACUGAAUCA | | |
| AD- | UCACUUGAUGG | 31 | 370-390 | UGAACCUUGUCC | 166 | 368-390 |
| 1560798 | ACAAGGUUCA | | | AUCAAGUGAAC | | |
| AD- | GAUGGACAAGG | 32 | 376-396 | UUGCUCUGAACC | 167 | 374-396 |
| 1560804 | UUCAGAGCAA | | | UUGUCCAUCAA | | |
| AD- | CAAGGUUCAGA | 33 | 382-402 | UACAGUAUGCUC | 168 | 380-402 |
| 1560810 | GCAUACUGUA | | | UGAACCUUGUC | | |
| AD- | UCAGAGCAUAC | 34 | 388-408 | UUUAUCCACAGU | 169 | 386-408 |
| 1560816 | UGUGGAUAAA | | | AUGCUCUGAAC | | |
| AD- | AAGAAAUAUGC | 35 | 409-429 | UAGUUCUGCAGC | 170 | 407-429 |
| 1560837 | UGCAGAACUA | | | AUAUUUCUUUU | | |
| AD- | UAUGCUGCAGA | 36 | 415-435 | UAAGUGAAGUUC | 171 | 413-435 |
| 1560845 | ACUUCACUUA | | | UGCAGCAUAUU | | |
| AD- | GCAGAACUUCA | 37 | 421-441 | UUGAACCAAGUG | 172 | 419-441 |
| 1560851 | CUUGGUUCAA | | | AAGUUCUGCAG | | |
| AD- | CUUCACUUGGU | 38 | 817-837 | UUUCCAGUGAAC | 173 | |
| 1560843 | UCACUGGAAA | | | CAAGUGAAGUU | | |
| AD- | UUUGGGAAAGC | 39 | 463-483 | UUGCUGCACAGC | 174 | 461-483 |
| 1560862 | UGUGCAGCAA | | | UUUCCCAAAAU | | |
| AD- | GUGCAGCAACC | 40 | 475-495 | UAGUCCAUCAGG | 175 | 473-495 |
| 1560874 | UGAUGGACUA | | | UUGCUGCACAG | | |
| AD- | CAACCUGAUGG | 41 | 481-501 | UACGGCCAGUCC | 176 | 479-501 |
| 1560880 | ACUGGCCGUA | | | AUCAGGUUGCU | | |
| AD- | CUGGCCGUUCU | 42 | 493-513 | UAAAAUACCUAG | 177 | 491-513 |
| 1560892 | AGGUAUUUUA | | | AACGGCCAGUC | | |
| AD- | UGAAGGUUGGC | 43 | 515-535 | UUUUAGCGCUGC | 178 | 513-535 |
| 1560895 | AGCGCUAAAA | | | CAACCUUCAAA | | |
| AD- | GCAGCGCUAAA | 44 | 524-544 | UAAGGCCCGGUU | 179 | 522-544 |
| 1560904 | CCGGGCCUUA | | | UAGCGCUGCCA | | |
| AD- | CCGGGCCUUCA | 45 | 535-555 | UACAACUUUCUG | 180 | 533-555 |
| 1560915 | GAAAGUUGUA | | | AAGGCCCGGUU | | |
| AD- | CUUCAGAAAGU | 46 | 541-561 | UACAUCAACAAC | 181 | 539-561 |
| 1560921 | UGUUGAUGUA | | | UUUCUGAAGGC | | |
| AD- | GUUGUUGAUGU | 47 | 550-570 | UGAAUCCAGCAC | 182 | 548-570 |
| 1560930 | GCUGGAUUCA | | | AUCAACAACUU | | |
| AD- | GCUGGAUUCCA | 48 | 561-581 | UUUGUUUUAAUG | 183 | 559-581 |
| 1560941 | UUAAAACAAA | | | GAAUCCAGCAC | | |
| AD- | UCCAUUAAAAC | 49 | 568-588 | UUUGCCCUUUGU | 184 | 566-588 |
| 1560948 | AAAGGGCAAA | | | UUUAAUGGAAU | | |
| AD- | AAAACAAAGGG | 50 | 574-594 | UGCACUCUUGCC | 185 | 572-594 |
| 1560954 | CAAGAGUGCA | | | CUUUGUUUUAA | | |
| AD- | GGCAAGAGUGC | 51 | 583-603 | UGUGAAGUCAGC | 186 | 581-603 |
| 1560963 | UGACUUCACA | | | ACUCUUGCCCU | | |
| AD- | GUGCUGACUUC | 52 | 590-610 | UGAAGUUAGUGA | 187 | 588-610 |
| 1560970 | ACUAACUUCA | | | AGUCAGCACUC | | |
| AD- | ACUUCACUAAC | 53 | 596-616 | UAGGAUCGAAGU | 188 | 594-616 |
| 1560976 | UUCGAUCCUA | | | UAGUGAAGUCA | | |
| AD- | CGAUCCUCGUG | 54 | 609-629 | UGAAGGAGGCCA | 189 | 607-629 |
| 1560989 | GCCUCCUUCA | | | CGAGGAUCGAA | | |
| AD- | UCGUGGCCUCC | 55 | 615-635 | UAUUCAGGAAGG | 190 | 613-635 |
| 1560996 | UUCCUGAAUA | | | AGGCCACGAGG | | |
| AD- | CCUCCUUCCUG | 56 | 621-641 | UCCAAGGAUUCA | 191 | 619-641 |
| 1561002 | AAUCCUUGGA | | | GGAAGGAGGCC | | |
| AD- | CCUGAAUCCUU | 57 | 628-648 | UCAGUAAUCCAA | 192 | 626-648 |
| 1561009 | GGAUUACUGA | | | GGAUUCAGGAA | | |
| AD- | UCCUUGGAUUA | 58 | 634-654 | UUAGGUCCAGUA | 193 | 632-654 |
| 1561015 | CUGGACCUAA | | | AUCCAAGGAUU | | |
| AD- | CCUACCCAGGC | 59 | 650-670 | UGGUCAGUGAGC | 194 | 648-670 |
| 1561031 | UCACUGACCA | | | CUGGGUAGGUC | | |
| AD- | CCUCUUCUGGA | 60 | 676-696 | UGUCACACAUUC | 195 | 674-696 |
| 1561037 | AUGUGUGACA | | | CAGAAGAGGAG | | |
| AD- | UGGAAUGUGUG | 61 | 683-703 | UAAUCCAGGUCA | 196 | 681-703 |
| 1561043 | ACCUGGAUUA | | | CACAUUCCAGA | | |
| AD- | UGUGACCUGGA | 62 | 690-710 | UUGAGCACAAUC | 197 | 688-710 |
| 1561050 | UUGUGCUCAA | | | CAGGUCACACA | | |
| AD- | CUGGAUUGUGC | 63 | 696-716 | UGUUCCUUGAGC | 198 | 694-716 |
| 1561056 | UCAAGGAACA | | | ACAAUCCAGGU | | |
| AD- | CUCAAGGAACC | 64 | 706-726 | UACGCUGAUGGG | 199 | 704-726 |
| 1561066 | CAUCAGCGUA | | | UUCCUUGAGCA | | |
| AD- | GAACCCAUCAG | 65 | 712-732 | UCUGCUGACGCU | 200 | 710-732 |
| 1561072 | CGUCAGCAGA | | | GAUGGGUUCCU | | |
| AD- | AGAACUGAUGG | 66 | 719-739 | UAGUUGUCCACC | 201 | 717-739 |
| 1475424 | UGGACAACUA | | | AUCAGUUCUUC | | |
| AD- | CGAGCAGGUGU | 67 | 732-752 | UGGAAUUUCAAC | 202 | 730-752 |
| 1561092 | UGAAAUUCCA | | | ACCUGCUCGCU | | |
| AD- | GGUGUUGAAAU | 68 | 738-758 | UGUUUACGGAAU | 203 | 736-758 |
| 1561100 | UCCGUAAACA | | | UUCAACACCUG | | |
| AD- | GAAAUUCCGUA | 69 | 744-764 | UAGUUAAGUUUA | 204 | 742-764 |
| 1561106 | AACUUAACUA | | | CGGAAUUUCAA | | |
| AD- | CCGUAAACUUA | 70 | 750-770 | UCAUUGAAGUUA | 205 | 748-770 |
| 1561112 | ACUUCAAUGA | | | AGUUUACGGAA | | |
| AD- | GAGGGUGAACC | 71 | 772-792 | UAGUUCUUCGGG | 206 | 770-792 |
| 1561116 | CGAAGAACUA | | | UUCACCCUCCC | | |
| AD- | GAACCCGAAGA | 72 | 778-798 | UACCAUCAGUUC | 207 | 776-798 |
| 1561122 | ACUGAUGGUA | | | UUCGGGUUCAC | | |
| AD- | AUGGUGGACAA | 73 | 793-813 | UGGGCGCCAGUU | 208 | 791-813 |
| 1561130 | CUGGCGCCCA | | | GUCCACCAUCA | | |
| AD- | CCAGCUCAGCC | 74 | 811-831 | UUUCUUCAGUGG | 209 | 809-831 |
| 1561146 | ACUGAAGAAA | | | CUGAGCUGGGC | | |
| AD- | CAGCCACUGAA | 75 | 817-837 | UUGCCUGUUCUU | 210 | 815-837 |
| 1561152 | GAACAGGCAA | | | CAGUGGCUGAG | | |
| AD- | CUGAAGAACAG | 76 | 823-843 | UUUGAUUUGCCU | 211 | 821-843 |
| 1561158 | GCAAAUCAAA | | | GUUCUUCAGUG | | |
| AD- | UCACUGGAACA | 77 | 828-848 | UCAUAUUUGGUG | 212 | 826-848 |
| 1446763 | CCAAAUAUGA | | | UUCCAGUGAAC | | |
| AD- | GGCAAAUCAAA | 78 | 833-853 | UGAAGGAAGCUU | 213 | 831-853 |
| 1561168 | GCUUCCUUCA | | | UGAUUUGCCUG | | |
| AD- | CAAAGCUUCCU | 79 | 840-860 | UCUUAUUUGAAG | 214 | 838-860 |
| 1561175 | UCAAAUAAGA | | | GAAGCUUUGAU | | |
| AD- | UUCCUUCAAAU | 80 | 846-866 | UGACCAUCUUAU | 215 | 844-866 |
| 1561181 | AAGAUGGUCA | | | UUGAAGGAAGC | | |
| AD- | AUAAGAUGGUC | 81 | 855-875 | UAGACUAUGGGA | 216 | 853-875 |
| 1561190 | CCAUAGUCUA | | | CCAUCUUAUUU | | |
| AD- | UGGUCCCAUAG | 82 | 861-881 | UGGAUACAGACU | 217 | 859-881 |
| 1561196 | UCUGUAUCCA | | | AUGGGACCAUC | | |
| AD- | AUAGUCUGUAU | 83 | 868-888 | UAUUAUUUGGAU | 218 | 866-888 |
| 1561203 | CCAAAUAAUA | | | ACAGACUAUGG | | |
| AD- | GUAUCCAAAUA | 84 | 875-895 | UAAGAUUCAUUA | 219 | 873-895 |
| 1561210 | AUGAAUCUUA | | | UUUGGAUACAG | | |
| AD- | AUAAUGAAUCU | 85 | 883-903 | UAACACCCGAAG | 220 | 881-903 |
| 1561218 | UCGGGUGUUA | | | AUUCAUUAUUU | | |
| AD- | AUCUUCGGGUG | 86 | 890-910 | UAAAGGGAAACA | 221 | 888-910 |
| 1561225 | UUUCCCUUUA | | | CCCGAAGAUUC | | |
| AD- | GGGUGUUUCCC | 87 | 896-916 | UUUAGCUAAAGG | 222 | 894-916 |
| 1561231 | UUUAGCUAAA | | | GAAACACCCGA | | |
| AD- | CCCUUUAGCUA | 88 | 904-924 | UAUCUGUGCUUA | 223 | 902-924 |
| 1561239 | AGCACAGAUA | | | GCUAAAGGGAA | | |
| AD- | AGCUAAGCACA | 89 | 910-930 | UAGGUAGAUCUG | 224 | 908-930 |
| 1561245 | GAUCUACCUA | | | UGCUUAGCUAA | | |
| AD- | CAGAUCUACCU | 90 | 919-939 | UAAAUCACCAAG | 225 | 917-939 |
| 1561254 | UGGUGAUUUA | | | GUAGAUCUGUG | | |
| AD- | ACCUUGGUGAU | 91 | 926-946 | UAGGGUCCAAAU | 226 | 924-946 |
| 1561261 | UUGGACCCUA | | | CACCAAGGUAG | | |
| AD- | UUGGACCCUGG | 92 | 937-957 | UACAAAGCAACC | 227 | 935-957 |
| 1561272 | UUGCUUUGUA | | | AGGGUCCAAAU | | |
| AD- | CUGGUUGCUUU | 93 | 944-964 | UACUAGACACAA | 228 | 942-964 |
| 1561279 | GUGUCUAGUA | | | AGCAACCAGGG | | |
| AD- | GCUUUGUGUCU | 94 | 950-970 | UUAGAAAACUAG | 229 | 948-970 |
| 1561285 | AGUUUUCUAA | | | ACACAAAGCAA | | |
| AD- | CUAGUUUUCUA | 95 | 959-979 | UUGAAGGGUCUA | 230 | 957-979 |
| 1561294 | GACCCUUCAA | | | GAAAACUAGAC | | |
| AD- | UUCUAGACCCU | 96 | 965-985 | UAAGAGAUGAAG | 231 | 963-985 |
| 1561300 | UCAUCUCUUA | | | GGUCUAGAAAA | | |
| AD- | ACCCUUCAUCU | 97 | 971-991 | UUCAAGUAAGAG | 232 | 969-991 |
| 1561306 | CUUACUUGAA | | | AUGAAGGGUCU | | |
| AD- | AUCUCUUACUU | 98 | 978-998 | UAAGUCUAUCAA | 233 | 976-998 |
| 1561313 | GAUAGACUUA | | | GUAAGAGAUGA | | |
| AD- | UACUUGAUAGA | 99 | 984-1004 | UAUUAGUAAGUC | 234 | 982-1004 |
| 1561319 | CUUACUAAUA | | | UAUCAAGUAAG | | |
| AD- | CUUACUAAUAA | 100 | 995-1015 | UCUUCACAUUUU | 235 | 993-1015 |
| 1561327 | AAUGUGAAGA | | | AUUAGUAAGUC | | |
| AD- | AAAAUGUGAAG | 101 | 1004- | UUGGUCUAGUCU | 236 | 1002- |
| 1561336 | ACUAGACCAA | | 1024 | UCACAUUUUAU | | 1024 |
| AD- | UGAAGACUAGA | 102 | 1010- | UGACAAUUGGUC | 237 | 1008- |
| 1561342 | CCAAUUGUCA | | 1030 | UAGUCUUCACA | | 1030 |
| AD- | UAGACCAAUUG | 103 | 1017- | UCAAGCAUGACA | 238 | 1015- |
| 1561349 | UCAUGCUUGA | | 1037 | AUUGGUCUAGU | | 1037 |
| AD- | UCAUGCUUGAC | 104 | 1028- | UAGCAGUUGUGU | 239 | 1026- |
| 1561360 | ACAACUGCUA | | 1048 | CAAGCAUGACA | | 1048 |
| AD- | UUGACACAACU | 105 | 1034- | UAGCCACAGCAG | 240 | 1032- |
| 1561366 | GCUGUGGCUA | | 1054 | UUGUGUCAAGC | | 1054 |
| AD- | CUGUGGCUGGU | 106 | 1046- | UAAAGCACCAAC | 241 | 1044- |
| 1561378 | UGGUGCUUUA | | 1066 | CAGCCACAGCA | | 1066 |
| AD- | CUGGUUGGUGC | 107 | 1052- | UAUAAACAAAGC | 242 | 1050- |
| 1561384 | UUUGUUUAUA | | 1072 | ACCAACCAGCC | | 1072 |
| AD- | GGUGCUUUGUU | 108 | 1058- | UACUACCAUAAA | 243 | 1056- |
| 1561390 | UAUGGUAGUA | | 1078 | CAAAGCACCAA | | 1078 |
| AD- | UUGUUUAUGGU | 109 | 1064- | UAAAACUACUAC | 244 | 1062- |
| 1561396 | AGUAGUUUUA | | 1084 | CAUAAACAAAG | | 1084 |
| AD- | UGGUAGUAGUU | 110 | 1071- | UUUACAGAAAAA | 245 | 1069- |
| 1561402 | UUUCUGUAAA | | 1091 | CUACUACCAUA | | 1091 |
| AD- | UAGUUUUUCUG | 111 | 1077- | UUCUGUGUUACA | 246 | 1075- |
| 1561408 | UAACACAGAA | | 1097 | GAAAAACUACU | | 1097 |
| AD- | UUCUGUAACAC | 112 | 1083- | UCUAUAUUCUGU | 247 | 1081- |
| 1561414 | AGAAUAUAGA | | 1103 | GUUACAGAAAA | | 1103 |
| AD- | CACAGAAUAUA | 113 | 1091- | UUUCUUAUCCUA | 248 | 1089- |
| 1561422 | GGAUAAGAAA | | 1111 | UAUUCUGUGUU | | 1111 |
| AD- | AGAAUAAAGUA | 114 | 1114- | UAAGUCAAGGUA | 249 | 1112- |
| 1561433 | CCUUGACUUA | | 1134 | CUUUAUUCUUA | | 1134 |
| AD- | CUUGACUUUGU | 115 | 1126- | UAUGCUGUGAAC | 250 | 1124- |
| 1561444 | UCACAGCAUA | | 1146 | AAAGUCAAGGU | | 1146 |
| AD- | UUUGUUCACAG | 116 | 1132- | UCCCUACAUGCU | 251 | 1130- |
| 1561450 | CAUGUAGGGA | | 1152 | GUGAACAAAGU | | 1152 |
| AD- | CACAGCAUGUA | 117 | 1138- | UUCAUCACCCUA | 252 | 1136- |
| 1561456 | GGGUGAUGAA | | 1158 | CAUGCUGUGAA | | 1158 |
| AD- | UAGGGUGAUGA | 118 | 1147- | UUGUGAGUGCUC | 253 | 1145- |
| 1561465 | GCACUCACAA | | 1167 | AUCACCCUACA | | 1167 |
| AD- | GAUGAGCACUC | 119 | 1153- | UAACAAUUGUGA | 254 | 1151- |
| 1561471 | ACAAUUGUUA | | 1173 | GUGCUCAUCAC | | 1173 |
| AD- | ACUCACAAUUG | 120 | 1160- | UUUUAGUCAACA | 255 | 1158- |
| 1561478 | UUGACUAAAA | | 1180 | AUUGUGAGUGC | | 1180 |
| AD- | UUGACUAAAAU | 121 | 1171- | UAAAAGCAGCAU | 256 | 1169- |
| 1561489 | GCUGCUUUUA | | 1191 | UUUAGUCAACA | | 1191 |
| AD- | AUGCUGCUUUU | 122 | 1180- | UCUAUGUUUUAA | 257 | 1178- |
| 1561498 | AAAACAUAGA | | 1200 | AAGCAGCAUUU | | 1200 |
| AD- | CUUUUAAAACA | 123 | 1186- | UACUUUCCUAUG | 258 | 1184- |
| 1561504 | UAGGAAAGUA | | 1206 | UUUUAAAAGCA | | 1206 |
| AD- | CAUAGGAAAGU | 124 | 1195- | UAACCAUUCUAC | 259 | 1193- |
| 1561513 | AGAAUGGUUA | | 1215 | UUUCCUAUGUU | | 1215 |
| AD- | AGUAGAAUGGU | 125 | 1203- | UUUGCACUCAAC | 260 | 1201- |
| 1561521 | UGAGUGCAAA | | 1223 | CAUUCUACUUU | | 1223 |
| AD- | AUGGUUGAGUG | 126 | 1209- | UAUGGAUUUGCA | 261 | 1207- |
| 1561527 | CAAAUCCAUA | | 1229 | CUCAACCAUUC | | 1229 |
| AD- | AGUGCAAAUCC | 127 | 1216- | UUUGUGCUAUGG | 262 | 1214- |
| 1561534 | AUAGCACAAA | | 1236 | AUUUGCACUCA | | 1236 |
| AD- | UCCAUAGCACA | 128 | 1224- | UAAUUUAUCUUG | 263 | 1222- |
| 1561542 | AGAUAAAUUA | | 1244 | UGCUAUGGAUU | | 1244 |
| AD- | CAAGAUAAAUU | 129 | 1233- | UAACUAGCUCAA | 264 | 1231- |
| 1561551 | GAGCUAGUUA | | 1253 | UUUAUCUUGUG | | 1253 |
| AD- | GAGCUAGUUAA | 130 | 1244 | UUGAUUUGCCUU | 265 | 1242- |
| 1561562 | GGCAAAUCAA | | 1264 | AACUAGCUCAA | | 1264 |
| AD- | UAAGGCAAAUC | 131 | 1252- | UAUUUUACCUGA | 266 | 1250- |
| 1561570 | AGGUAAAAUA | | 1272 | UUUGCCUUAAC | | 1272 |
| AD- | AGGUAAAAUAG | 132 | 1263- | UGAAUCAUGACU | 267 | 1261- |
| 1561581 | UCAUGAUUCA | | 1283 | AUUUUACCUGA | | 1283 |
| AD- | GUCAUGAUUCU | 133 | 1273- | UACAUUACAUAG | 268 | 1271- |
| 1561591 | AUGUAAUGUA | | 1293 | AAUCAUGACUA | | 1293 |
| AD- | UAUGUAAUGUA | 134 | 1283- | UUUUCUGGUUUA | 269 | 1281- |
| 1561601 | AACCAGAAAA | | 1303 | CAUUACAUAGA | | 1303 |
| AD- | UCAUGAUUUCA | 135 | 1313- | UAUAACAUCUUG | 270 | 1311- |
| 1561613 | AGAUGUUAUA | | 1333 | AAAUCAUGAAC | | 1333 |
| AD- | CUUUUGAAUUA | 136 | 1411- | UAUAUCUCUGUA | 271 | 1409- |
| 1561651 | CAGAGAUAUA | | 1431 | AUUCAAAAGUC | | 1431 |
| AD- | UUAGAGUUGUG | 137 | 1463- | UACUCUGUAUCA | 272 | 1461- |
| 1561679 | AUACAGAGUA | | 1483 | CAACUCUAAUU | | 1483 |
| AD- | UACAGAGUAUA | 138 | 1475- | UGAAUGGAAAUA | 273 | 1473- |
| 1561686 | UUUCCAUUCA | | 1495 | UACUCUGUAUC | | 1495 |
| AD- | AUAUUUCCAUU | 139 | 1483- | UUAUUGUCUGAA | 274 | 1481- |
| 1561694 | CAGACAAUAA | | 1503 | UGGAAAUAUAC | | 1503 |
| AD- | UUCAGACAAUA | 140 | 1492- | UGUUAUGAUAUA | 275 | 1490- |
| 1561703 | UAUCAUAACA | | 1512 | UUGUCUGAAUG | | 1512 |
| AD- | UUGUGAUACAG | 141 | 1835- | UAAAUAUACUCU | 276 | 1833- |
| 1447598 | AGUAUAUUUA | | 1855 | GUAUCACAACU | | 1855 |

TABLE 4
Unmodified Sense and Antisense Strand Sequences of CA2 dsRNA Agents for
GalNAc Modification

| | | SEQ | Range in | | | Range in |
|---|---|---|---|---|---|---|
| Duplex | Sense Sequence | ID | NM_ | Antisense Sequence | SEQ ID | NM_ |
| Name | 5′ to 3′ | NO: | 000067.3 | 5′ to 3′ | NO: | 000067.3 |
| AD- | AGAUCGGUGCC | 277 | 32-52 | AGCAGGAAUCGG | 412 | 30-52 |
| 1559459 | GAUUCCUGCU | | | CACCGAUCUGG | | |
| AD- | CGCGACCAUGU | 278 | 69-89 | AAGUGAUGGGAC | 413 | 67-89 |
| 1559476 | CCCAUCACUU | | | AUGGUCGCGCU | | |
| AD- | GUACGGCAAAC | 279 | 93-113 | AGUCCGUUGUGU | 414 | 91-113 |
| 1559481 | ACAACGGACU | | | UUGCCGUACCC | | |
| AD- | CAAACACAACG | 280 | 99-119 | AGCUCAGGUCCG | 415 | 97-119 |
| 1559487 | GACCUGAGCU | | | UUGUGUUUGCC | | |
| AD- | GGACCUGAGCA | 281 | 109-129 | AUUAUGCCAGUG | 416 | 107-129 |
| 1559497 | CUGGCAUAAU | | | CUCAGGUCCGU | | |
| AD- | GAGCACUGGCA | 282 | 115-135 | AAAGUCCUUAUG | 417 | 113-135 |
| 1559503 | UAAGGACUUU | | | CCAGUGCUCAG | | |
| AD- | GUUGACAUCGA | 283 | 166-186 | AGUAUGAGUGUC | 418 | 164-186 |
| 1559514 | CACUCAUACU | | | GAUGUCAACAG | | |
| AD- | ACACUCAUACA | 284 | 176-196 | AAUACUUGGCUG | 419 | 174-196 |
| 1559524 | GCCAAGUAUU | | | UAUGAGUGUCG | | |
| AD- | UACAGCCAAGU | 285 | 183-203 | AAAGGGUCAUAC | 420 | 181-203 |
| 1559531 | AUGACCCUUU | | | UUGGCUGUAUG | | |
| AD- | CAAGUAUGACC | 286 | 189-209 | AUCAGGGAAGGG | 421 | 187-209 |
| 1559537 | CUUCCCUGAU | | | UCAUACUUGGC | | |
| AD- | UGUCUGUUUCC | 282 | 215-235 | AUUGAUCAUAGG | 422 | 213-235 |
| 1559543 | UAUGAUCAAU | | | AAACAGACAGG | | |
| AD- | CCUAUGAUCAA | 288 | 224-244 | AGGAAGUUGCUU | 423 | 222-244 |
| 1559552 | GCAACUUCCU | | | GAUCAUAGGAA | | |
| AD- | CAAGCAACUUC | 289 | 232-252 | AAUCCUCAGGGA | 424 | 230-252 |
| 1559560 | CCUGAGGAUU | | | AGUUGCUUGAU | | |
| AD- | CCCUGAGGAUC | 290 | 242-262 | AAUUGUUGAGGA | 425 | 240-262 |
| 1559570 | CUCAACAAUU | | | UCCUCAGGGAA | | |
| AD- | UCCUCAACAAU | 291 | 251-271 | AAGCAUGACCAU | 426 | 249-271 |
| 1559579 | GGUCAUGCUU | | | UGUUGAGGAUC | | |
| AD- | ACAAUGGUCAU | 292 | 257-277 | AGUUGAAAGCAU | 427 | 255-277 |
| 1559585 | GCUUUCAACU | | | GACCAUUGUUG | | |
| AD- | AUGCUUUCAAC | 293 | 266-286 | AAAACUCCACGU | 428 | 264-286 |
| 1559594 | GUGGAGUUUU | | | UGAAAGCAUGA | | |
| AD- | AACGUGGAGUU | 294 | 274-294 | AGAGUCAUCAAA | 429 | 272-294 |
| 1559602 | UGAUGACUCU | | | CUCCACGUUGA | | |
| AD- | UGAUGACUCUC | 295 | 285-305 | ACUUUGUCCUGA | 430 | 283-305 |
| 1559613 | AGGACAAAGU | | | GAGUCAUCAAA | | |
| AD- | UCUCAGGACAA | 296 | 292-312 | AAGCACUGCUUU | 431 | 290-312 |
| 1559620 | AGCAGUGCUU | | | GUCCUGAGAGU | | |
| AD- | GACAAAGCAGU | 297 | 298-318 | ACCCUUGAGCAC | 432 | 296-318 |
| 1559626 | GCUCAAGGGU | | | UGCUUUGUCCU | | |
| AD- | UGGCACUUACA | 298 | 330-350 | AGAAUCAAUCUG | 433 | 328-350 |
| 1559638 | GAUUGAUUCU | | | UAAGUGCCAUC | | |
| AD- | UUACAGAUUGA | 299 | 336-356 | AGAAACUGAAUC | 434 | 334-356 |
| 1559644 | UUCAGUUUCU | | | AAUCUGUAAGU | | |
| AD- | AUUCAGUUUCA | 300 | 346-366 | ACAGUGAAAGUG | 435 | 344-366 |
| 1559654 | CUUUCACUGU | | | AAACUGAAUCA | | |
| AD- | UCACUUGAUGG | 301 | 370-390 | AGAACCUUGUCC | 436 | 368-390 |
| 1559660 | ACAAGGUUCU | | | AUCAAGUGAAC | | |
| AD- | GAUGGACAAGG | 302 | 376-396 | AUGCUCUGAACC | 437 | 374-396 |
| 1559666 | UUCAGAGCAU | | | UUGUCCAUCAA | | |
| AD- | CAAGGUUCAGA | 303 | 382-402 | AACAGUAUGCUC | 438 | 380-402 |
| 1559672 | GCAUACUGUU | | | UGAACCUUGUC | | |
| AD- | UCAGAGCAUAC | 304 | 388-408 | AUUAUCCACAGU | 439 | 386-408 |
| 1559678 | UGUGGAUAAU | | | AUGCUCUGAAC | | |
| AD- | AAGAAAUAUGC | 305 | 409-429 | AAGUUCUGCAGC | 440 | 407-429 |
| 1559699 | UGCAGAACUU | | | AUAUUUCUUUU | | |
| AD- | UAUGCUGCAGA | 306 | 415-435 | AAAGUGAAGUUC | 441 | 413-435 |
| 1559705 | ACUUCACUUU | | | UGCAGCAUAUU | | |
| AD- | GCAGAACUUCA | 307 | 421-441 | AUGAACCAAGUG | 442 | 419-441 |
| 1559711 | CUUGGUUCAU | | | AAGUUCUGCAG | | |
| AD- | CUUCACUUGGU | 308 | 427-447 | AUUCCAGUGAAC | 443 | 425-447 |
| 1559717 | UCACUGGAAU | | | CAAGUGAAGUU | | |
| AD- | UCACUGGAACA | 309 | 438-458 | ACAUAUUUGGUG | 444 | 436-458 |
| 1559728 | CCAAAUAUGU | | | UUCCAGUGAAC | | |
| AD- | UUUGGGAAAGC | 310 | 463-483 | AUGCUGCACAGC | 445 | 461-483 |
| 1559735 | UGUGCAGCAU | | | UUUCCCAAAAU | | |
| AD- | GUGCAGCAACC | 311 | 475-495 | AAGUCCAUCAGG | 446 | 473-495 |
| 1559747 | UGAUGGACUU | | | UUGCUGCACAG | | |
| AD- | CAACCUGAUGG | 312 | 481-501 | AACGGCCAGUCC | 447 | 479-501 |
| 1559753 | ACUGGCCGUU | | | AUCAGGUUGCU | | |
| AD- | CUGGCCGUUCU | 313 | 493-513 | AAAAAUACCUAG | 448 | 491-513 |
| 1559765 | AGGUAUUUUU | | | AACGGCCAGUC | | |
| AD- | UGAAGGUUGGC | 314 | 515-535 | AUUUAGCGCUGC | 449 | 513-535 |
| 1559768 | AGCGCUAAAU | | | CAACCUUCAAA | | |
| AD- | GCAGCGCUAAA | 315 | 524-544 | AAAGGCCCGGUU | 450 | 522-544 |
| 1559777 | CCGGGCCUUU | | | UAGCGCUGCCA | | |
| AD- | CCGGGCCUUCA | 316 | 535-555 | AACAACUUUCUG | 451 | 533-555 |
| 1559788 | GAAAGUUGUU | | | AAGGCCCGGUU | | |
| AD- | CUUCAGAAAGU | 317 | 541-561 | AACAUCAACAAC | 452 | 539-561 |
| 1559794 | UGUUGAUGUU | | | UUUCUGAAGGC | | |
| AD- | GUUGUUGAUGU | 318 | 550-570 | AGAAUCCAGCAC | 453 | 548-570 |
| 1559803 | GCUGGAUUCU | | | AUCAACAACUU | | |
| AD- | GCUGGAUUCCA | 319 | 561-581 | AUUGUUUUAAUG | 454 | 559-581 |
| 1559814 | UUAAAACAAU | | | GAAUCCAGCAC | | |
| AD- | UCCAUUAAAAC | 320 | 568-588 | AUUGCCCUUUGU | 455 | 566-588 |
| 1559821 | AAAGGGCAAU | | | UUUAAUGGAAU | | |
| AD- | AAAACAAAGGG | 321 | 574-594 | AGCACUCUUGCC | 456 | 572-594 |
| 1559827 | CAAGAGUGCU | | | CUUUGUUUUAA | | |
| AD- | GGCAAGAGUGC | 322 | 583-603 | AGUGAAGUCAGC | 457 | 581-603 |
| 1559836 | UGACUUCACU | | | ACUCUUGCCCU | | |
| AD- | GUGCUGACUUC | 323 | 590-610 | AGAAGUUAGUGA | 458 | 588-610 |
| 1559843 | ACUAACUUCU | | | AGUCAGCACUC | | |
| AD- | ACUUCACUAAC | 324 | 596-616 | AAGGAUCGAAGU | 459 | 594-616 |
| 1559849 | UUCGAUCCUU | | | UAGUGAAGUCA | | |
| AD- | CGAUCCUCGUG | 325 | 609-629 | AGAAGGAGGCCA | 460 | 607-629 |
| 1559862 | GCCUCCUUCU | | | CGAGGAUCGAA | | |
| AD- | UCGUGGCCUCC | 326 | 615-635 | AAUUCAGGAAGG | 461 | 613-635 |
| 1559868 | UUCCUGAAUU | | | AGGCCACGAGG | | |
| AD- | CCUCCUUCCUG | 327 | 621-641 | ACCAAGGAUUCA | 462 | 619-641 |
| 1559874 | AAUCCUUGGU | | | GGAAGGAGGCC | | |
| AD- | CCUGAAUCCUU | 328 | 628-648 | ACAGUAAUCCAA | 463 | 626-648 |
| 1559881 | GGAUUACUGU | | | GGAUUCAGGAA | | |
| AD- | UCCUUGGAUUA | 329 | 634-654 | AUAGGUCCAGUA | 464 | 632-654 |
| 1559887 | CUGGACCUAU | | | AUCCAAGGAUU | | |
| AD- | CCUACCCAGGC | 330 | 650-670 | AGGUCAGUGAGC | 465 | 648-670 |
| 1559903 | UCACUGACCU | | | CUGGGUAGGUC | | |
| AD- | CCUCUUCUGGA | 331 | 676-696 | AGUCACACAUUC | 466 | 674-696 |
| 1559909 | AUGUGUGACU | | | CAGAAGAGGAG | | |
| AD- | UGGAAUGUGUG | 332 | 683-703 | AAAUCCAGGUCA | 467 | 681-703 |
| 1559916 | ACCUGGAUUU | | | CACAUUCCAGA | | |
| AD- | UGUGACCUGGA | 333 | 690-710 | AUGAGCACAAUC | 468 | 688-710 |
| 1559923 | UUGUGCUCAU | | | CAGGUCACACA | | |
| AD- | CUGGAUUGUGC | 334 | 696-716 | AGUUCCUUGAGC | 469 | 694-716 |
| 1559929 | UCAAGGAACU | | | ACAAUCCAGGU | | |
| AD- | CUCAAGGAACC | 335 | 706-726 | AACGCUGAUGGG | 470 | 704-726 |
| 1559939 | CAUCAGCGUU | | | UUCCUUGAGCA | | |
| AD- | GAACCCAUCAG | 336 | 712-732 | ACUGCUGACGCU | 471 | 710-732 |
| 1559945 | CGUCAGCAGU | | | GAUGGGUUCCU | | |
| AD- | CGAGCAGGUGU | 337 | 732-752 | AGGAAUUUCAAC | 472 | 730-752 |
| 1559965 | UGAAAUUCCU | | | ACCUGCUCGCU | | |
| AD- | GGUGUUGAAAU | 338 | 738-758 | AGUUUACGGAAU | 473 | 736-758 |
| 1559971 | UCCGUAAACU | | | UUCAACACCUG | | |
| AD- | GAAAUUCCGUA | 339 | 744-764 | AAGUUAAGUUUA | 474 | 742-764 |
| 1559977 | AACUUAACUU | | | CGGAAUUUCAA | | |
| AD- | CCGUAAACUUA | 340 | 750-770 | ACAUUGAAGUUA | 475 | 748-770 |
| 1559983 | ACUUCAAUGU | | | AGUUUACGGAA | | |
| AD- | GAGGGUGAACC | 341 | 772-792 | AAGUUCUUCGGG | 476 | 770-792 |
| 1559987 | CGAAGAACUU | | | UUCACCCUCCC | | |
| AD- | GAACCCGAAGA | 342 | 778-798 | AACCAUCAGUUC | 477 | 776-798 |
| 1559993 | ACUGAUGGUU | | | UUCGGGUUCAC | | |
| AD- | AGAACUGAUGG | 343 | 786-806 | AAGUUGUCCACC | 478 | 784-806 |
| 1560001 | UGGACAACUU | | | AUCAGUUCUUC | | |
| AD- | AUGGUGGACAA | 344 | 793-813 | AGGGCGCCAGUU | 479 | 791-813 |
| 1560008 | CUGGCGCCCU | | | GUCCACCAUCA | | |
| AD- | CCAGCUCAGCC | 345 | 811-831 | AUUCUUCAGUGG | 480 | 809-831 |
| 1560024 | ACUGAAGAAU | | | CUGAGCUGGGC | | |
| AD- | CAGCCACUGAA | 346 | 817-837 | AUGCCUGUUCUU | 481 | 815-837 |
| 1560030 | GAACAGGCAU | | | CAGUGGCUGAG | | |
| AD- | CUGAAGAACAG | 347 | 823-843 | AUUGAUUUGCCU | 482 | 821-843 |
| 1560036 | GCAAAUCAAU | | | GUUCUUCAGUG | | |
| AD- | GGCAAAUCAAA | 348 | 833-853 | AGAAGGAAGCUU | 483 | 831-853 |
| 1560046 | GCUUCCUUCU | | | UGAUUUGCCUG | | |
| AD- | CAAAGCUUCCU | 349 | 840-860 | ACUUAUUUGAAG | 484 | 838-860 |
| 1560053 | UCAAAUAAGU | | | GAAGCUUUGAU | | |
| AD- | UUCCUUCAAAU | 350 | 846-866 | AGACCAUCUUAU | 485 | 844-866 |
| 1560059 | AAGAUGGUCU | | | UUGAAGGAAGC | | |
| AD- | AUAAGAUGGUC | 351 | 855-875 | AAGACUAUGGGA | 486 | 853-875 |
| 1560068 | CCAUAGUCUU | | | CCAUCUUAUUU | | |
| AD- | UGGUCCCAUAG | 352 | 861-881 | AGGAUACAGACU | 487 | 859-881 |
| 1560074 | UCUGUAUCCU | | | AUGGGACCAUC | | |
| AD- | AUAGUCUGUAU | 353 | 868-888 | AAUUAUUUGGAU | 488 | 866-888 |
| 1560081 | CCAAAUAAUU | | | ACAGACUAUGG | | |
| AD- | GUAUCCAAAUA | 354 | 875-895 | AAAGAUUCAUUA | 489 | 873-895 |
| 1560088 | AUGAAUCUUU | | | UUUGGAUACAG | | |
| AD | AUAAUGAAUCU | 355 | 883-903 | AAACACCCGAAG | 490 | 881-903 |
| 1560096 | UCGGGUGUUU | | | AUUCAUUAUUU | | |
| AD- | AUCUUCGGGUG | 356 | 890-910 | AAAAGGGAAACA | 491 | 888-910 |
| 1560103 | UUUCCCUUUU | | | CCCGAAGAUUC | | |
| AD- | GGGUGUUUCCC | 357 | 896-916 | AUUAGCUAAAGG | 492 | 894-916 |
| 1560109 | UUUAGCUAAU | | | GAAACACCCGA | | |
| AD- | CCCUUUAGCUA | 358 | 904-924 | AAUCUGUGCUUA | 493 | 902-924 |
| 1560117 | AGCACAGAUU | | | GCUAAAGGGAA | | |
| AD- | AGCUAAGCACA | 359 | 910-930 | AAGGUAGAUCUG | 494 | 908-930 |
| 1560123 | GAUCUACCUU | | | UGCUUAGCUAA | | |
| AD- | CAGAUCUACCU | 360 | 919-939 | AAAAUCACCAAG | 495 | 917-939 |
| 1560132 | UGGUGAUUUU | | | GUAGAUCUGUG | | |
| AD- | ACCUUGGUGAU | 361 | 926-946 | AAGGGUCCAAAU | 496 | 924-946 |
| 1560139 | UUGGACCCUU | | | CACCAAGGUAG | | |
| AD- | UUGGACCCUGG | 362 | 937-957 | AACAAAGCAACC | 497 | 935-957 |
| 1560150 | UUGCUUUGUU | | | AGGGUCCAAAU | | |
| AD- | CUGGUUGCUUU | 363 | 944-964 | AACUAGACACAA | 498 | 942-964 |
| 1560157 | GUGUCUAGUU | | | AGCAACCAGGG | | |
| AD- | GCUUUGUGUCU | 364 | 950-970 | AUAGAAAACUAG | 499 | 948-970 |
| 1560163 | AGUUUUCUAU | | | ACACAAAGCAA | | |
| AD- | CUAGUUUUCUA | 365 | 959-979 | AUGAAGGGUCUA | 500 | 957-979 |
| 1560172 | GACCCUUCAU | | | GAAAACUAGAC | | |
| AD- | UUCUAGACCCU | 366 | 965-985 | AAAGAGAUGAAG | 501 | 963-985 |
| 1560178 | UCAUCUCUUU | | | GGUCUAGAAAA | | |
| AD- | ACCCUUCAUCU | 367 | 971-991 | AUCAAGUAAGAG | 502 | 969-991 |
| 1560184 | CUUACUUGAU | | | AUGAAGGGUCU | | |
| AD- | AUCUCUUACUU | 368 | 978-998 | AAAGUCUAUCAA | 503 | 976-998 |
| 1560191 | GAUAGACUUU | | | GUAAGAGAUGA | | |
| AD- | UACUUGAUAGA | 369 | 984-1004 | AAUUAGUAAGUC | 504 | 982-1004 |
| 1560197 | CUUACUAAUU | | | UAUCAAGUAAG | | |
| AD- | CUUACUAAUAA | 370 | 995-1015 | ACUUCACAUUUU | 505 | 993-1015 |
| 1560205 | AAUGUGAAGU | | | AUUAGUAAGUC | | |
| AD- | AAAAUGUGAAG | 371 | 1004- | AUGGUCUAGUCU | 506 | 1002- |
| 1560214 | ACUAGACCAU | | 1024 | UCACAUUUUAU | | 1024 |
| AD- | UGAAGACUAGA | 372 | 1010- | AGACAAUUGGUC | 507 | 1008- |
| 1560220 | CCAAUUGUCU | | 1030 | UAGUCUUCACA | | 1030 |
| AD- | UAGACCAAUUG | 373 | 1017- | ACAAGCAUGACA | 508 | 1015- |
| 1560227 | UCAUGCUUGU | | 1037 | AUUGGUCUAGU | | 1037 |
| AD- | UCAUGCUUGAC | 374 | 1028- | AAGCAGUUGUGU | 509 | 1026- |
| 1560238 | ACAACUGCUU | | 1048 | CAAGCAUGACA | | 1048 |
| AD- | UUGACACAACU | 375 | 1034- | AAGCCACAGCAG | 510 | 1032- |
| 1560244 | GCUGUGGCUU | | 1054 | UUGUGUCAAGC | | 1054 |
| AD- | CUGUGGCUGGU | 376 | 1046- | AAAAGCACCAAC | 511 | 1044- |
| 1560256 | UGGUGCUUUU | | 1066 | CAGCCACAGCA | | 1066 |
| AD- | CUGGUUGGUGC | 377 | 1052- | AAUAAACAAAGC | 512 | 1050- |
| 1560262 | UUUGUUUAUU | | 1072 | ACCAACCAGCC | | 1072 |
| AD- | GGUGCUUUGUU | 378 | 1058- | AACUACCAUAAA | 513 | 1056- |
| 1560268 | UAUGGUAGUU | | 1078 | CAAAGCACCAA | | 1078 |
| AD- | UUGUUUAUGGU | 379 | 1064- | AAAAACUACUAC | 514 | 1062- |
| 1560274 | AGUAGUUUUU | | 1084 | CAUAAACAAAG | | 1084 |
| AD- | UGGUAGUAGUU | 380 | 1071- | AUUACAGAAAAA | 515 | 1069- |
| 1560280 | UUUCUGUAAU | | 1091 | CUACUACCAUA | | 1091 |
| AD- | UAGUUUUUCUG | 381 | 1077- | AUCUGUGUUACA | 516 | 1075- |
| 1560286 | UAACACAGAU | | 1097 | GAAAAACUACU | | 1097 |
| AD- | UUCUGUAACAC | 382 | 1083- | ACUAUAUUCUGU | 517 | 1081- |
| 1560292 | AGAAUAUAGU | | 1103 | GUUACAGAAAA | | 1103 |
| AD- | CACAGAAUAUA | 383 | 1091- | AUUCUUAUCCUA | 518 | 1089- |
| 1560300 | GGAUAAGAAU | | 1111 | UAUUCUGUGUU | | 1111 |
| AD- | AGAAUAAAGUA | 384 | 1114- | AAAGUCAAGGUA | 519 | 1112- |
| 1560311 | CCUUGACUUU | | 1134 | CUUUAUUCUUA | | 1134 |
| AD- | CUUGACUUUGU | 385 | 1126- | AAUGCUGUGAAC | 520 | 1124- |
| 1560323 | UCACAGCAUU | | 1146 | AAAGUCAAGGU | | 1146 |
| AD- | UUUGUUCACAG | 386 | 1132- | ACCCUACAUGCU | 521 | 1130- |
| 1560329 | CAUGUAGGGU | | 1152 | GUGAACAAAGU | | 1152 |
| AD- | CACAGCAUGUA | 387 | 1138- | AUCAUCACCCUA | 522 | 1136- |
| 1560335 | GGGUGAUGAU | | 1158 | CAUGCUGUGAA | | 1158 |
| AD- | UAGGGUGAUGA | 388 | 1147- | AUGUGAGUGCUC | 523 | 1145- |
| 1560344 | GCACUCACAU | | 1167 | AUCACCCUACA | | 1167 |
| AD- | GAUGAGCACUC | 389 | 1153- | AAACAAUUGUGA | 524 | 1151- |
| 1560350 | ACAAUUGUUU | | 1173 | GUGCUCAUCAC | | 1173 |
| AD- | ACUCACAAUUG | 390 | 1160- | AUUUAGUCAACA | 525 | 1158- |
| 1560357 | UUGACUAAAU | | 1180 | AUUGUGAGUGC | | 1180 |
| AD- | UUGACUAAAAU | 391 | 1171- | AAAAAGCAGCAU | 526 | 1169- |
| 1560368 | GCUGCUUUUU | | 1191 | UUUAGUCAACA | | 1191 |
| AD- | AUGCUGCUUUU | 392 | 1180- | ACUAUGUUUUAA | 527 | 1178- |
| 1560377 | AAAACAUAGU | | 1200 | AAGCAGCAUUU | | 1200 |
| AD- | CUUUUAAAACA | 393 | 1186- | AACUUUCCUAUG | 528 | 1184- |
| 1560383 | UAGGAAAGUU | | 1206 | UUUUAAAAGCA | | 1206 |
| AD- | CAUAGGAAAGU | 394 | 1195- | AAACCAUUCUAC | 529 | 1193- |
| 1560392 | AGAAUGGUUU | | 1215 | UUUCCUAUGUU | | 1215 |
| AD- | AGUAGAAUGGU | 395 | 1203- | AUUGCACUCAAC | 530 | 1201- |
| 1560400 | UGAGUGCAAU | | 1223 | CAUUCUACUUU | | 1223 |
| AD- | AUGGUUGAGUG | 396 | 1209- | AAUGGAUUUGCA | 531 | 1207- |
| 1560406 | CAAAUCCAUU | | 1229 | CUCAACCAUUC | | 1229 |
| AD- | AGUGCAAAUCC | 397 | 1216- | AUUGUGCUAUGG | 532 | 1214- |
| 1560413 | AUAGCACAAU | | 1236 | AUUUGCACUCA | | 1236 |
| AD- | UCCAUAGCACA | 398 | 1224- | AAAUUUAUCUUG | 533 | 1222- |
| 1560421 | AGAUAAAUUU | | 1244 | UGCUAUGGAUU | | 1244 |
| AD- | CAAGAUAAAUU | 399 | 1233- | AAACUAGCUCAA | 534 | 1231- |
| 1560430 | GAGCUAGUUU | | 1253 | UUUAUCUUGUG | | 1253 |
| AD- | GAGCUAGUUAA | 400 | 1244- | AUGAUUUGCCUU | 535 | 1242- |
| 1560441 | GGCAAAUCAU | | 1264 | AACUAGCUCAA | | 1264 |
| AD- | UAAGGCAAAUC | 401 | 1252- | AAUUUUACCUGA | 536 | 1250- |
| 1560449 | AGGUAAAAUU | | 1272 | UUUGCCUUAAC | | 1272 |
| AD- | AGGUAAAAUAG | 402 | 1263- | AGAAUCAUGACU | 537 | 1261- |
| 1560460 | UCAUGAUUCU | | 1283 | AUUUUACCUGA | | 1283 |
| AD- | GUCAUGAUUCU | 403 | 1273- | AACAUUACAUAG | 538 | 1271- |
| 1560470 | AUGUAAUGUU | | 1293 | AAUCAUGACUA | | 1293 |
| AD- | UAUGUAAUGUA | 404 | 1283- | AUUUCUGGUUUA | 539 | 1281- |
| 1560480 | AACCAGAAAU | | 1303 | CAUUACAUAGA | | 1303 |
| AD- | UCAUGAUUUCA | 405 | 1313- | AAUAACAUCUUG | 540 | 1311- |
| 1560492 | AGAUGUUAUU | | 1333 | AAAUCAUGAAC | | 1333 |
| AD- | CUUUUGAAUUA | 406 | 1411- | AAUAUCUCUGUA | 541 | 1409- |
| 1560528 | CAGAGAUAUU | | 1431 | AUUCAAAAGUC | | 1431 |
| AD- | UUAGAGUUGUG | 407 | 1463- | AACUCUGUAUCA | 542 | 1461- |
| 1560556 | AUACAGAGUU | | 1483 | CAACUCUAAUU | | 1483 |
| AD- | UUGUGAUACAG | 408 | 1469- | AAAAUAUACUCU | 543 | 1467- |
| 1560562 | AGUAUAUUUU | | 1489 | GUAUCACAACU | | 1489 |
| AD- | UACAGAGUAUA | 409 | 1475- | AGAAUGGAAAUA | 544 | 1473- |
| 1560568 | UUUCCAUUCU | | 1495 | UACUCUGUAUC | | 1495 |
| AD- | AUAUUUCCAUU | 410 | 1483- | AUAUUGUCUGAA | 545 | 1481- |
| 1560576 | CAGACAAUAU | | 1503 | UGGAAAUAUAC | | 1503 |
| AD- | UUCAGACAAUA | 411 | 1492- | AGUUAUGAUAUA | 546 | 1490- |
| 1560585 | UAUCAUAACU | | 1512 | UUGUCUGAAUG | | 1512 |

TABLE 5
Modified Sense and Antisense Strand Sequences of CA2 dsRNA Agents with C16
Modification

| | | SEQ | | SEQ | mRNA Target | SEQ |
|---|---|---|---|---|---|---|
| Duplex | Sense Sequence | ID | Antisense Sequence | ID | Sequence | ID |
| Name | 5′ to 3′ | NO: | 5′ to 3′ | NO: | 5′ to 3′ | NO: |
| AD- | asgsauc(Ghd)GfuGf | 547 | VPusGfscagGfaAfUfc | 682 | CCAGAUCGGUGC | 817 |
| 1560600 | CfCfgauuccugscsa | | ggcAfcCfgaucusgsg | | CGAUUCCUGCC | |
| AD- | csgscga(Chd)CfaUf | 548 | VPusAfsgugAfuGfGf | 683 | AGCGCGACCAUG | 818 |
| 1560617 | GfUfcccaucacsusa | | gacaUfgGfucgcgscsu | | UCCCAUCACUG | |
| AD- | gsusacg(Ghd)CfaAf | 549 | VPusGfsuccGfuUfGfu | 684 | GGGUACGGCAAA | 819 |
| 1560622 | AfCfacaacggascsa | | guuUfgCfcguacsesc | | CACAACGGACC | |
| AD- | csasaac(Ahd)CfaAf | 550 | VPusGfscucAfgGfUfc | 685 | GGCAAACACAAC | 820 |
| 1560628 | CfGfgaccugagscsa | | cguUfgUfguuugsesc | | GGACCUGAGCA | |
| AD- | gsgsacc(Uhd)GfaGf | 551 | VPusUfsuauGfcCfAfg | 686 | ACGGACCUGAGC | 821 |
| 1560638 | CfAfcuggcauasasa | | ugcUfcAfggucesgsu | | ACUGGCAUAAG | |
| AD- | gsasgca(Chd)UfgGf | 552 | VPusAfsaguCfcUfUfa | 687 | CUGAGCACUGGC | 822 |
| 1560644 | CfAfuaaggacususa | | ugcCfaGfugcucsasg | | AUAAGGACUUC | |
| AD- | gsusuga(Chd)AfuCf | 553 | VPusGfsuauGfaGfUfg | 688 | CUGUUGACAUCG | 823 |
| 1560655 | GfAfcacucauascsa | | ucgAfuGfucaacsasg | | ACACUCAUACA | |
| AD- | ascsacu(Chd)AfuAf | 554 | VPusAfsuacUfuGfGfc | 689 | CGACACUCAUAC | 824 |
| 1560665 | CfAfgccaaguasusa | | uguAfuGfagugusesg | | AGCCAAGUAUG | |
| AD- | usascag(Chd)CfaAf | 555 | VPusAfsaggGfuCfAfu | 690 | CAUACAGCCAAG | 825 |
| 1560672 | GfUfaugacccususa | | acuUfgGfcuguasusg | | UAUGACCCUUC | |
| AD- | csasagu(Ahd)UfgAf | 556 | VPusUfscagGfgAfAfg | 691 | GCCAAGUAUGAC | 826 |
| 1560678 | CfCfcuucccugsasa | | gguCfaUfacuugsgsc | | CCUUCCCUGAA | |
| AD- | usgsucu(Ghd)UfuUf | 557 | VPusUfsugaUfcAfUfa | 692 | CCUGUCUGUUUC | 827 |
| 1560684 | CfCfuaugaucasasa | | ggaAfaCfagacasgsg | | CUAUGAUCAAG | |
| AD- | cscsuau(Ghd)AfuCf | 558 | VPusGfsgaaGfuUfGfc | 693 | UUCCUAUGAUCA | 828 |
| 1560693 | AfAfgcaacuucscsa | | ungAfuCfauaggsasa | | AGCAACUUCCC | |
| AD- | csasagc(Ahd)AfcUf | 559 | VPusAfsuccUfcAfGfg | 694 | AUCAAGCAACUU | 829 |
| 1560701 | UfCfccugaggasusa | | gaaGfuUfgcuugsasu | | CCCUGAGGAUC | |
| AD- | cscscug(Ahd)GfgAf | 560 | VPusAfsuugUfuGfAf | 695 | UUCCCUGAGGAU | 830 |
| 1560711 | UfCfcucaacaasusa | | ggauCfcUfcagggsasa | | CCUCAACAAUG | |
| AD- | uscscuc(Ahd)AfcAf | 561 | VPusAfsgcaUfgAfCfc | 696 | GAUCCUCAACAA | 831 |
| 1560720 | AfUfggucaugcsusa | | auuGfuUfgaggasusc | | UGGUCAUGCUU | |
| AD- | ascsaau(Ghd)GfuCf | 562 | VPusGfsuugAfaAfGfc | 697 | CAACAAUGGUCA | 832 |
| 1560726 | AfUfgcuuucaascsa | | augAfcCfauugususg | | UGCUUUCAACG | |
| AD- | asusgcu(Uhd)UfcAf | 563 | VPusAfsaacUfcCfAfc | 698 | UCAUGCUUUCAA | 833 |
| 1560735 | AfCfguggaguususa | | guuGfaAfagcausgsa | | CGUGGAGUUUG | |
| AD- | asascgu(Ghd)GfaGf | 564 | VPusGfsaguCfaUfCfa | 699 | UCAACGUGGAGU | 834 |
| 1560745 | UfUfugaugacuscsa | | aacUfcCfacguusgsa | | UUGAUGACUCU | |
| AD- | usgsaug(Abd)CfuCf | 565 | VPusCfsuuuGfuCfCfu | 700 | UUUGAUGACUCU | 835 |
| 1560752 | UfCfaggacaaasgsa | | gagAfgUfcaucasasa | | CAGGACAAAGC | |
| AD- | uscsuca(Ghd)GfaCf | 566 | VPusAfsgcaCfuGfCfu | 701 | ACUCUCAGGACA | 836 |
| 1560759 | AfAfagcagugesusa | | uugUfcCfugagasgsu | | AAGCAGUGCUC | |
| AD- | gsascaa(Ahd)GfcAf | 567 | VPasCfsccuUfgAfGfc | 702 | AGGACAAAGCAG | 837 |
| 1560765 | GfUfgcucaaggsgsa | | acuGfcUfuuguescsu | | UGCUCAAGGGA | |
| AD- | usgsgca(Chd)UfuAf | 568 | VPusGfsaauCfaAfUfc | 703 | GAUGGCACUUAC | 838 |
| 1560777 | CfAfgaungauuscsa | | uguAfaGfugccasusc | | AGAUUGAUUCA | |
| AD- | ususaca(Ghd)AfuUf | 569 | VPusGfsaaaCfuGfAfa | 704 | ACUUACAGAUUG | 839 |
| 1560783 | GfAfuucaguuuscsa | | ucaAfuCfuguaasgsu | | AUUCAGUUUCA | |
| AD- | asusuca(Ghd)UfuUf | 570 | VPusCfsaguGfaAfAfg | 705 | UGAUUCAGUUUC | 840 |
| 1560792 | CfAfcuuucacusgsa | | ugaAfaCfugaauscsa | | ACUUUCACUGG | |
| AD- | uscsacu(Ubd)GfaUf | 571 | VPusGfsaacCfuUfGfu | 706 | GUUCACUUGAUG | 841 |
| 1560798 | GfGfacaagguuscsa | | ccaUfcAfagugasasc | | GACAAGGUUCA | |
| AD- | gsasugg(Ahd)CfaAf | 572 | VPusUfsgcuCfuGfAfa | 707 | UUGAUGGACAAG | 842 |
| 1560804 | GfGfuucagagcsasa | | ccuUfgUfccaucsasa | | GUUCAGAGCAU | |
| AD | csasagg(Uhd)UfcAf | 573 | VPusAfscagUfaUfGfc | 708 | GACAAGGUUCAG | 843 |
| 1560810 | GfAfgcauacugsusa | | ucuGfaAfccuugsusc | | AGCAUACUGUG | |
| AD- | uscsaga(Ghd)CfaUf | 574 | VPusUfsuauCfcAfCfa | 709 | GUUCAGAGCAUA | 844 |
| 1560816 | AfCfuguggauasasa | | guaUfgCfucugasasc | | CUGUGGAUAAA | |
| AD- | asasgaa(Ahd)UfaUf | 575 | VPusAfsguuCfuGfCfa | 710 | AAAAGAAAUAUG | 845 |
| 1560837 | GfCfugcagaacsusa | | gcaUfaUfuucuususu | | CUGCAGAACUU | |
| AD- | usasugc(Uhd)GfcAf | 576 | VPusAfsaguGfaAfGfu | 711 | AAUAUGCUGCAG | 846 |
| 1560845 | GfAfacuucacususa | | ucuGfcAfgcauasusu | | AACUUCACUUG | |
| AD- | gscsaga(Ahd)CfuUf | 577 | VPusUfsgaaCfcAfAfg | 712 | CUGCAGAACUUC | 847 |
| 1560851 | CfAfcuugguucsasa | | ugaAfgUfucugcsasg | | ACUUGGUUCAC | |
| AD- | csusuca(Chd)UfuGf | 578 | VPusUfsuccAfgUfGfa | 713 | AACUUCACUUGG | 848 |
| 1560843 | GfUfucacuggasasa | | accAfaGfugaagsusu | | UUCACUGGAAC | |
| AD- | ususugg(Ghd)AfaAf | 579 | VPusUfsgcuGfcAfCfa | 714 | AUUUUGGGAAAG | 849 |
| 1560862 | GfCfugugcagesasa | | gcuUfuCfccaaasasu | | CUGUGCAGCAA | |
| AD- | gsusgca(Ghd)CfaAf | 580 | VPusAfsgucCfaUfCfa | 715 | CUGUGCAGCAAC | 850 |
| 1560874 | CfCfugauggacsusa | | gguUfgCfugcacsasg | | CUGAUGGACUG | |
| AD- | csasacc(Uhd)GfaUf | 581 | VPasAfscggCfcAfGfu | 716 | AGCAACCUGAUG | 851 |
| 1560880 | GfGfacuggccgsusa | | ccaUfcAfgguugscsu | | GACUGGCCGUU | |
| AD- | csusggc(Chd)GfuUf | 582 | VPusAfsaaaUfaCfCfu | 717 | GACUGGCOGUUC | 852 |
| 1560892 | CfUfagguauuususa | | agaAfcGfgccagsusc | | UAGGUAUUUUU | |
| AD- | usgsaag(Ghd)UfuGf | 583 | VPusUfsuuaGfcGfCfu | 718 | UUUGAAGGUUGG | 853 |
| 1560895 | GfCfagcgcuaasasa | | gccAfaCfcuucasasa | | CAGCGCUAAAC | |
| AD- | gscsagc(Ghd)CfuAf | 584 | VPusAfsaggCfcCfGfg | 719 | UGGCAGCGCUAA | 854 |
| 1560904 | AfAfccgggccususa | | uuuAfgCfgcugcscsa | | ACCGGGCCUUC | |
| AD- | cscsggg(Chd)CfuUf | 585 | VPusAfscaaCfuUfUfc | 720 | AACCGGGCCUUC | 855 |
| 1560915 | CfAfgaaaguugsusa | | ugaAfgGfcccggsusu | | AGAAAGUUGUU | |
| AD- | csusuca(Ghd)AfaAf | 586 | VPusAfscauCfaAfCfa | 721 | GCCUUCAGAAAG | 856 |
| 1560921 | GfUfuguugaugsusa | | acuUfuCfugaagsgsc | | UUGUUGAUGUG | |
| AD- | gsusugu(Uhd)GfaUf | 587 | VPusGfsaauCfcAfGfc | 722 | AAGUUGUUGAUG | 857 |
| 1560930 | GfUfgcuggauuscsa | | acaUfcAfacaacsusu | | UGCUGGAUUCC | |
| AD- | gscsugg(Ahd)UfuCf | 588 | VPusUfsuguUfuUfAf | 723 | GUGCUGGAUUCC | 858 |
| 1560941 | CfAfuuaaaacasasa | | auggAfaUfccagcsasc | | AUUAAAACAAA | |
| AD- | uscscau(Uhd)AfaAf | 589 | VPusUfsugcCfcUfUfu | 724 | AUUCCAUUAAAA | 859 |
| 1560948 | AfCfaaagggcasasa | | guuUfuAfauggasasu | | CAAAGGGCAAG | |
| AD- | asasaac(Ahd)AfaGf | 590 | VPasGfscacUfcUfUfg | 725 | UUAAAACAAAGG | 860 |
| 1560954 | GfGfcaagagugscsa | | cccUfuUfguuuusasa | | GCAAGAGUGCU | |
| AD- | gsgscaa(Ghd)AfgUf | 591 | VPusGfsugaAfgUfCfa | 726 | AGGGCAAGAGUG | 861 |
| 1560963 | GfCfugacuucascsa | | gcaCfuCfuugcescsu | | CUGACUUCACU | |
| AD- | gsusgcu(Ghd)AfcUf | 592 | VPusGfsaagUfuAfGfu | 727 | GAGUGCUGACUU | 862 |
| 1560970 | UfCfacuaacuuscsa | | gaaGfuCfagcacsusc | | CACUAACUUCG | |
| AD- | ascsuuc(Ahd)CfuAf | 593 | VPusAfsggaUfcGfAfa | 728 | UGACUUCACUAA | 863 |
| 1560976 | AfCfuucgauccsusa | | guuAfgUfgaaguscsa | | CUUCGAUCCUC | |
| AD- | csgsauc(Chd)UfcGf | 594 | VPusGfsaagGfaGfGfc | 729 | UUCGAUCCUCGU | 864 |
| 1560989 | UfGfgccuccuuscsa | | cacGfaGfgaucgsasa | | GGCCUCCUUCC | |
| AD- | usesgug(Ghd)CfcUf | 595 | VPusAfsuucAfgGfAfa | 730 | CCUCGUGGCCUC | 865 |
| 1560996 | CfCfuuccugaasusa | | ggaGfgCfcacgasgsg | | CUUCCUGAAUC | |
| AD- | cscsucc(Uhd)UfcCf | 596 | VPusCfscaaGfgAfUfu | 731 | GGCCUCCUUCCU | 866 |
| 1561002 | UfGfaauccuugsgsa | | cagGfaAfggaggscsc | | GAAUCCUUGGA | |
| AD- | cscsuga(Ahd)UfcCf | 597 | VPusCfsaguAfaUfCfc | 732 | UUCCUGAAUCCU | 867 |
| 1561009 | UfUfggauuacusgsa | | aagGfaUfucaggsasa | | UGGAUUACUGG | |
| AD- | uscscuu(Ghd)GfaUf | 598 | VPusUfsaggUfcCfAfg | 733 | AAUCCUUGGAUU | 868 |
| 1561015 | UfAfcuggaccusasa | | uaaUfcCfaaggasusu | | ACUGGACCUAC | |
| AD- | cscsuac(Chd)CfaGf | 599 | VPusGfsgucAfgUfGfa | 734 | GACCUACCCAGG | 869 |
| 1561031 | GfCfucacugacscsa | | gccUfgGfguaggsusc | | CUCACUGACCA | |
| AD- | cscsucu(Uhd)CfuGf | 600 | VPusGfsucaCfaCfAfu | 735 | CUCCUCUUCUGG | 870 |
| 1561037 | GfAfaugugugascsa | | uccAfgAfagaggsasg | | AAUGUGUGACC | |
| AD- | usgsgaa(Uhd)GfuGf | 601 | VPusAfsaucCfaGfGfu | 736 | UCUGGAAUGUGU | 871 |
| 1561043 | UfGfaccuggaususa | | cacAfcAfuuccasgsa | | GACCUGGAUUG | |
| AD- | usgsuga(Chd)CfuGf | 602 | VPusUfsgagCfaCfAfa | 737 | UGUGUGACCUGG | 872 |
| 1561050 | GfAfuugugcucsasa | | uccAfgGfucacascsa | | AUUGUGCUCAA | |
| AD- | csusgga(Uhd)UfgUf | 603 | VPusGfsuucCfuUfGfa | 738 | ACCUGGAUUGUG | 873 |
| 1561056 | GfCfucaaggaascsa | | gcaCfaAfuccagsgsu | | CUCAAGGAACC | |
| AD- | csuscaa(Ghd)GfaAf | 604 | VPasAfscgcUfgAfUfg | 739 | UGCUCAAGGAAC | 874 |
| 1561066 | CfCfcaucagcgsusa | | gguUfcCfuugagscsa | | CCAUCAGCGUC | |
| AD- | gsasacc(Chd)AfuCf | 605 | VPusCfsugcUfgAfCfg | 740 | AGGAACCCAUCA | 875 |
| 1561072 | AfGfcgucagcasgsa | | cugAfuGfgguucscsu | | GCGUCAGCAGC | |
| AD- | asgsaac(Uhd)GfaUf | 606 | VPusAfsguuGfuCfCfa | 741 | GAAGAACUGAUG | 876 |
| 1475424 | GfGfuggacaacsusa | | ccaUfcAfguucususc | | GUGGACAACUG | |
| AD- | csgsagc(Ahd)GfgUf | 607 | VPusGfsgaaUfuUfCfa | 742 | AGCGAGCAGGUG | 877 |
| 1561092 | GfUfugaaauucscsa | | acaCfcUfgcucgscsu | | UUGAAAUUCCG | |
| AD- | gsgsugu(Uhd)GfaAf | 608 | VPusGfsuuuAfcGfGfa | 743 | CAGGUGUUGAAA | 878 |
| 1561100 | AfUfuccguaaascsa | | auuUfcAfacaccsusg | | UUCCGUAAACU | |
| AD- | gsasaau(Uhd)CfcGf | 609 | VPusAfsguuAfaGfUf | 744 | UUGAAAUUCCGU | 879 |
| 1561106 | UfAfaacuuaacsusa | | uuacGfgAfauuucsasa | | AAACUUAACUU | |
| AD- | cscsgua(Ahd)AfcUf | 610 | VPusCfsauuGfaAfGfu | 745 | UUCCGUAAACUU | 880 |
| 1561112 | UfAfacuucaausgsa | | uaaGfuUfuacggsasa | | AACUUCAAUGG | |
| AD- | gsasggg(Uhd)GfaAf | 611 | VPusAfsguuCfuUfCfg | 746 | GGGAGGGUGAAC | 881 |
| 1561116 | CfCfcgaagaacsusa | | gguUfcAfcccucscsc | | CCGAAGAACUG | |
| AD- | gsasacc(Chd)GfaAf | 612 | VPusAfsccaUfcAfGfu | 747 | GUGAACCCGAAG | 882 |
| 1561122 | GfAfacugauggsusa | | ucuUfcGfgguucsasc | | AACUGAUGGUG | |
| AD- | asusggu(Ghd)GfaCf | 613 | VPasGfsggcGfcCfAfg | 748 | UGAUGGUGGACA | 883 |
| 1561130 | AfAfcuggcgccscsa | | ungUfcCfaccauscsa | | ACUGGCGCCCA | |
| AD- | cscsagc(Uhd)CfaGf | 614 | VPusUfsucuUfcAfGfu | 749 | GCCCAGCUCAGC | 884 |
| 1561146 | CfCfacugaagasasa | | ggcUfgAfgcuggsgsc | | CACUGAAGAAC | |
| AD- | csasgcc(Ahd)CfuGf | 615 | VPusUfsgccUfgUfUfc | 750 | CUCAGCCACUGA | 885 |
| 1561152 | AfAfgaacaggcsasa | | uucAfgUfggcugsasg | | AGAACAGGCAA | |
| AD- | csusgaa(Ghd)AfaCf | 616 | VPusUfsugaUfuUfGfc | 751 | CACUGAAGAACA | 886 |
| 1561158 | AfGfccaaaucasasa | | cugUfuCfuucagsusg | | GGCAAAUCAAA | |
| AD- | uscsacu(Ghd)GfaAf | 617 | VPusCfsauaUfuUfGfg | 752 | GUUCACUGGAAC | 887 |
| 1446763 | CfAfccaaauausgsa | | uguUfcCfagugasasc | | ACCAAAUAUGG | |
| AD- | gsgscaa(Ahd)UfcAf | 618 | VPusGfsaagGfaAfGfc | 753 | CAGGCAAAUCAA | 888 |
| 1561168 | AfAfgcuuccuuscsa | | uuuGfaUfuugccsusg | | AGCUUCCUUCA | |
| AD- | csasaag(Chd)UfuCf | 619 | VPusCfsuuaUfuUfGfa | 754 | AUCAAAGCUUCC | 889 |
| 1561175 | CfUfucaaauaasgsa | | aggAfaGfcuuugsasu | | UUCAAAUAAGA | |
| AD- | ususccu(Uhd)CfaAf | 620 | VPusGfsaccAfuCfUfu | 755 | GCUUCCUUCAAA | 890 |
| 1561181 | AfUfaagaugguscsa | | auuUfgAfaggaasgsc | | UAAGAUGGUCC | |
| AD- | asusaag(Ahd)UfgGf | 621 | VPusAfsgacUfaUfGfg | 756 | AAAUAAGAUGGU | 891 |
| 1561190 | UfCfccauagucsusa | | gacCfaUfcuuaususu | | CCCAUAGUCUG | |
| AD- | usgsguc(Chd)CfaUf | 622 | VPusGfsganAfcAfGfa | 757 | GAUGGUCCCAUA | 892 |
| 1561196 | AfGfucuguaucscsa | | cuaUfgGfgaccasusc | | GUCUGUAUCCA | |
| AD- | asusagu(Chd)UfgUf | 623 | VPusAfsuuaUfuUfGf | 758 | CCAUAGUCUGUA | 893 |
| 1561203 | AfUfccaaauaasusa | | gauaCfaGfacuausgsg | | UCCAAAUAAUG | |
| AD- | gsusauc(Chd)AfaAf | 624 | VPusAfsagaUfuCfAfu | 759 | CUGUAUCCAAAU | 894 |
| 1561210 | UfAfaugaaucususa | | uauUfuGfgauacsasg | | AAUGAAUCUUC | |
| AD- | asusaau(Ghd)AfaUf | 625 | VPusAfsacaCfcCfGfa | 760 | AAAUAAUGAAUC | 895 |
| 1561218 | CfUfucgggugususa | | agaUfuCfauuaususu | | UUCGGGUGUUU | |
| AD- | asuscuu(Chd)GfgGf | 626 | VPusAfsaagGfgAfAfa | 761 | GAAUCUUCGGGU | 896 |
| 1561225 | UfGfuuucccuususa | | cacCfcGfaagaususc | | GUUUCCCUUUA | |
| AD- | gsgsgug(Uhd)UfuCf | 627 | VPusUfsuagCfuAfAfa | 762 | UCGGGUGUUUCC | 897 |
| 1561231 | CfCfuuuagcuasasa | | gggAfaAfcacccsgsa | | CUUUAGCUAAG | |
| AD- | cscscuu(Uhd)AfgCf | 628 | VPusAfsucuGfuGfCfu | 763 | UUCCCUUUAGCU | 898 |
| 1561239 | UfAfagcacagasusa | | uagCfuAfaagggsasa | | AAGCACAGAUC | |
| AD- | asgscua(Ahd)GfcAf | 629 | VPusAfsgguAfgAfUf | 764 | UUAGCUAAGCAC | 899 |
| 1561245 | CfAfgaucuaccsusa | | cuguGfcUfuagcusasa | | AGAUCUACCUU | |
| AD- | csasgau(Chd)UfaCf | 630 | VPusAfsaauCfaCfCfa | 765 | CACAGAUCUACC | 900 |
| 1561254 | CfUfuggugauususa | | aggUfaGfaucugsusg | | UUGGUGAUUUG | |
| AD- | ascscuu(Ghd)GfuGf | 631 | VPusAfsgggUfcCfAfa | 766 | CUACCUUGGUGA | 901 |
| 1561261 | AfUfuuggacccsusa | | aucAfcCfaaggusasg | | UUUGGACCCUG | |
| AD- | ususgga(Chd)CfcUf | 632 | VPusAfscaaAfgCfAfa | 767 | AUUUGGACCCUG | 902 |
| 1561272 | GfGfuugcuuugsusa | | ccaGfgGfuccaasasu | | GUUGCUUUGUG | |
| AD- | csusggu(Uhd)GfcUf | 633 | VPusAfscuaGfaCfAfc | 768 | CCCUGGUUGCUU | 903 |
| 1561279 | UfUfgugucuagsusa | | aaaGfcAfaccagsgsg | | UGUGUCUAGUU | |
| AD- | gscsuuu(Ghd)UfgUf | 634 | VPusUfsagaAfaAfCfu | 769 | UUGCUUUGUGUC | 904 |
| 1561285 | CfUfaguuuucusasa | | agaCfaCfaaagcsasa | | UAGUUUUCUAG | |
| AD- | csusagu(Uhd)UfuCf | 635 | VPusUfsgaaGfgGfUfc | 770 | GUCUAGUUUUCU | 905 |
| 1561294 | UfAfgacccuucsasa | | uagAfaAfacuagsasc | | AGACCCUUCAU | |
| AD- | asuscua(Ghd)AfcCf | 636 | VPasAfsagaGfaUfGfa | 771 | UUUUCUAGACCC | 906 |
| 1561300 | CfUfucaucucususa | | aggGfuCfuagaasasa | | UUCAUCUCUUA | |
| AD- | ascsccu(Uhd)CfaUf | 637 | VPusUfscaaGfuAfAfg | 772 | AGACCCUUCAUC | 907 |
| 1561306 | CfUfcuuacungsasa | | agaUfgAfaggguscsu | | UCUUACUUGAU | |
| AD- | asuscuc(Uhd)UfaCf | 638 | VPusAfsaguCfuAfUfc | 773 | UCAUCUCUUACU | 908 |
| 1561313 | UfUfgauagacususa | | aagUfaAfgagausgsa | | UGAUAGACUUA | |
| AD- | usascuu(Ghd)AfuAf | 639 | VPusAfsuuaGfuAfAf | 774 | CUUACUUGAUAG | 909 |
| 1561319 | GfAfcuuacuaasusa | | gucuAfuCfaaguasasg | | ACUUACUAAUA | |
| AD- | csusuac(Ubd)AfaUf | 640 | VPusCfsuucAfcAfUfu | 775 | GACUUACUAAUA | 910 |
| 1561327 | AfAfaaugugaasgsa | | uuaUfuAfguaagsusc | | AAAUGUGAAGA | |
| AD- | asasaau(Ghd)UfgAf | 641 | VPusUfsgguCfuAfGf | 776 | AUAAAAUGUGAA | 911 |
| 1561336 | AfGfacuagacesasa | | ucuuCfaCfauuuusasu | | GACUAGACCAA | |
| AD- | usgsaag(Ahd)CfuAf | 642 | VPusGfsacaAfuUfGfg | 777 | UGUGAAGACUAG | 912 |
| 1561342 | GfAfccaauuguscsa | | ucuAfgUfcuucascsa | | ACCAAUUGUCA | |
| AD- | usasgac(Chd)AfaUf | 643 | VPusCfsaagCfaUfGfa | 778 | ACUAGACCAAUU | 913 |
| 1561349 | UfGfucaugcuusgsa | | caaUfuGfgucuasgsu | | GUCAUGCUUGA | |
| AD- | uscsaug(Chd)UfuGf | 644 | VPusAfsgcaGfuUfGfu | 779 | UGUCAUGCUUGA | 914 |
| 1561360 | AfCfacaacugesusa | | gucAfaGfcaugascsa | | CACAACUGCUG | |
| AD- | ususgac(Ahd)CfaAf | 645 | VPusAfsgccAfcAfGfc | 780 | GCUUGACACAAC | 915 |
| 1561366 | CfUfgcuguggesusa | | aguUfgUfgucaasgsc | | UGCUGUGGCUG | |
| AD- | csusgug(Ghd)CfuGf | 646 | VPusAfsaagCfaCfCfa | 781 | UGCUGUGGCUGG | 916 |
| 1561378 | GfUfuggugcuususa | | accAfgCfcacagscsa | | UUGGUGCUUUG | |
| AD- | csusggu(Uhd)GfgUf | 647 | VPusAfsuaaAfcAfAfa | 782 | GGCUGGUUGGUG | 917 |
| 1561384 | GfCfuuuguuuasusa | | gcaCfcAfaccagscsc | | CUUUGUUUAUG | |
| AD- | gsgsugc(Uhd)UfuGf | 648 | VPusAfscuaCfcAfUfa | 783 | UUGGUGCUUUGU | 918 |
| 1561390 | UfUfuaugguagsusa | | aacAfaAfgcaccsasa | | UUAUGGUAGUA | |
| AD- | ususguu(Uhd)AfuGf | 649 | VPusAfsaaaCfuAfCfu | 784 | CUUUGUUUAUGG | 919 |
| 1561396 | GfUfaguaguuususa | | accAfuAfaacaasasg | | UAGUAGUUUUU | |
| AD- | usgsgua(Ghd)UfaGf | 650 | VPasUfsuacAfgAfAfa | 785 | UAUGGUAGUAGU | 920 |
| 1561402 | UfUfuuucuguasasa | | aacUfaCfuaccasusa | | UUUUCUGUAAC | |
| AD- | usasguu(Uhd)UfuCf | 651 | VPusUfscugUfgUfUfa | 786 | AGUAGUUUUUCU | 92 |
| 1561408 | UfGfuaacacagsasa | | cagAfaAfaacuascsu | | GUAACACAGAA | |
| AD- | ususcug(Uhd)AfaCf | 652 | VPusCfsuauAfuUfCfu | 787 | UUUUCUGUAACA | 922 |
| 1561414 | AfCfagaauauasgsa | | gugUfuAfcagaasasa | | CAGAAUAUAGG | |
| AD- | csascag(Ahd)AfuAf | 653 | VPusUfsucuUfaUfCfc | 788 | AACACAGAAUAU | 923 |
| 1561422 | UfAfggauaagasasa | | uauAfuUfcugugsusu | | AGGAUAAGAAA | |
| AD- | asgsaau(Abd)AfaGf | 654 | VPusAfsaguCfaAfGfg | 789 | UAAGAAUAAAGU | 924 |
| 1561433 | UfAfccuugacususa | | uacUfuUfauucususa | | ACCUUGACUUU | |
| AD- | csusuga(Chd)UfuUf | 655 | VPusAfsugeUfgUfGfa | 790 | ACCUUGACUUUG | 925 |
| 1561444 | GfUfucacagcasusa | | acaAfaGfucaagsgsu | | UUCACAGCAUG | |
| AD- | ususugu(Ubd)CfaCf | 656 | VPusCfsccuAfcAfUfg | 791 | ACUUUGUUCACA | 926 |
| 1561450 | AfGfcauguaggsgsa | | cugUfgAfacaaasgsu | | GCAUGUAGGGU | |
| AD- | csascag(Chd)AfuGf | 657 | VPusUfscauCfaCfCfc | 792 | UUCACAGCAUGU | 927 |
| 1561456 | UfAfgggugaugsasa | | uacAfuGfcugugsasa | | AGGGUGAUGAG | |
| AD- | usasggg(Uhd)GfaUf | 658 | VPusUfsgugAfgUfGf | 793 | UGUAGGGUGAUG | 928 |
| 1561465 | GfAfgcacucacsasa | | cucaUfcAfcccuascsa | | AGCACUCACAA | |
| AD- | gsasuga(Ghd)CfaCf | 659 | VPasAfsacaAfuUfGfu | 794 | GUGAUGAGCACU | 929 |
| 1561471 | UfCfacaauugususa | | gagUfgCfucaucsasc | | CACAAUUGUUG | |
| AD- | ascsuca(Chd)AfaUf | 660 | VPusUfsuuaGfuCfAfa | 795 | GCACUCACAAUU | 930 |
| 1561478 | UfGfuugacuaasasa | | caaUfuGfugagusgsc | | GUUGACUAAAA | |
| AD- | ususgac(Uhd)AfaAf | 661 | VPusAfsaaaGfcAfGfc | 796 | UGUUGACUAAAA | 931 |
| 1561489 | AfUfgcugcuuususa | | auuUfuAfgucaascsa | | UGCUGCUUUUA | |
| AD- | asusgcu(Ghd)CfuUf | 662 | VPusCfsuauGfuUfUfu | 797 | AAAUGCUGCUUU | 932 |
| 1561498 | UfUfaaaacauasgsa | | aaaAfgCfagcaususu | | UAAAACAUAGG | |
| AD- | csusuuu(Ahd)AfaAf | 663 | VPusAfscuuUfcCfUfa | 798 | UGCUUUUAAAAC | 933 |
| 1561504 | CfAfuaggaaagsusa | | uguUfuUfaaaagscsa | | AUAGGAAAGUA | |
| AD- | csasuag(Ghd)AfaAf | 664 | VPusAfsaccAfuUfCfu | 799 | AACAUAGGAAAG | 934 |
| 1561513 | GfUfagaauggususa | | acuUfuCfcuaugsusu | | UAGAAUGGUUG | |
| AD- | asgsuag(Ahd)AfuGf | 665 | VPusUfsugcAfcUfCfa | 800 | AAAGUAGAAUGG | 935 |
| 1561521 | GfUfugagugcasasa | | accAfuUfcuacususu | | UUGAGUGCAAA | |
| AD- | asusggu(Uhd)GfaGf | 666 | VPusAfsuggAfuUfUf | 801 | GAAUGGUUGAGU | 936 |
| 1561527 | UfGfcaaauccasusa | | gcacUfcAfaccaususc | | GCAAAUCCAUA | |
| AD- | asgsugc(Ahd)AfaUf | 667 | VPusUfsuguGfcUfAf | 802 | UGAGUGCAAAUC | 937 |
| 1561534 | CfCfauagcacasasa | | uggaUfuUfgcacuscsa | | CAUAGCACAAG | |
| AD- | uscscau(Ahd)GfcAf | 668 | VPusAfsauuUfaUfCfu | 803 | AAUCCAUAGCAC | 938 |
| 1561542 | CfAfagauaaaususa | | uguGfcUfauggasusu | | AAGAUAAAUUG | |
| AD- | csasaga(Uhd)AfaAf | 669 | VPusAfsacuAfgCfUfc | 804 | CACAAGAUAAAU | 939 |
| 1561551 | UfUfgagcuagususa | | aauUfuAfucuugsusg | | UGAGCUAGUUA | |
| AD- | gsasgcu(Ahd)GfuUf | 670 | VPusUfsgauUfuGfCfc | 805 | UUGAGCUAGUUA | 940 |
| 1561562 | AfAfggcaaaucsasa | | uuaAfcUfagcucsasa | | AGGCAAAUCAG | |
| AD- | usasagg(Chd)AfaAf | 671 | VPusAfsuuuUfaCfCfu | 806 | GUUAAGGCAAAU | 941 |
| 1561570 | UfCfagguaaaasusa | | gauUfuGfccuuasasc | | CAGGUAAAAUA | |
| AD- | asgsgua(Ahd)AfaUf | 672 | VPusGfsaauCfaUfGfa | 807 | UCAGGUAAAAUA | 942 |
| 1561581 | AfGfucaugauuscsa | | cuaUfuUfuaccusgsa | | GUCAUGAUUCU | |
| AD- | gsuscau(Ghd)AfuUf | 673 | VPusAfscauUfaCfAfu | 808 | UAGUCAUGAUUC | 943 |
| 1561591 | CfUfauguaaugsusa | | agaAfuCfaugacsusa | | UAUGUAAUGUA | |
| AD- | usasugu(Ahd)AfuGf | 674 | VPusUfsuucUfgGfUf | 809 | UCUAUGUAAUGU | 944 |
| 1561601 | UfAfaaccagaasasa | | uuacAfuUfacauasgsa | | AAACCAGAAAA | |
| AD- | uscsaug(Ahd)UfuUf | 675 | VPusAfsuaaCfaUfCfu | 810 | GUUCAUGAUUUC | 945 |
| 1561613 | CfAfagauguuasusa | | ugaAfaUfcaugasasc | | AAGAUGUUAUA | |
| AD- | csusuuu(Ghd)AfaUf | 676 | VPusAfsuauCfuCfUfg | 811 | GACUUUUGAAUU | 946 |
| 1561651 | UfAfcagagauasusa | | uaaUfuCfaaaagsusc | | ACAGAGAUAUA | |
| AD- | ususaga(Ghd)UfuGf | 677 | VPusAfscucUfgUfAfu | 812 | AAUUAGAGUUGU | 947 |
| 1561679 | UfGfauacagagsusa | | cacAfaCfucuaasusu | | GAUACAGAGUA | |
| AD- | usascag(Ahd)GfuAf | 678 | VPusGfsaauGfgAfAfa | 813 | GAUACAGAGUAU | 948 |
| 1561686 | UfAfuuuccauuscsa | | uauAfcUfcuguasusc | | AUUUCCAUUCA | |
| AD- | asusauu(Uhd)CfcAf | 679 | VPusUfsauuGfuCfUfg | 814 | GUAUAUUUCCAU | 949 |
| 1561694 | UfUfcagacaausasa | | aauGfgAfaauausasc | | UCAGACAAUAU | |
| AD- | ususcag(Ahd)CfaAf | 680 | VPusGfsunaUfgAfUfa | 815 | CAUUCAGACAAU | 950 |
| 1561703 | UfAfuaucauaascsa | | uauUfgUfcugaasusg | | AUAUCAUAACU | |
| AD- | ususgug(Ahd)UfaCf | 681 | VPusAfsaauAfuAfCfu | 816 | AGUUGUGAUACA | 951 |
| 1447598 | AfGfaguauauususa | | cugUfaUfcacaascsu | | GAGUAUAUUUC | |

TABLE 6
Modified Sense and Antisense Strand Sequences of CA2 dsRNA Agents with
GalNAc Modification

| | | SEQ | | SEQ | mRNA Target | SEQ |
|---|---|---|---|---|---|---|
| Duplex | Sense Sequence | ID | Antisense Sequence | ID | Sequence | ID |
| Name | 5′ to 3′ | NO: | 5′ to 3′ | NO: | 5′ to 3′ | NO: |
| AD- | asgsaucgGfuGfCfC | 952 | asGfscagGfaAfUfcggc | 1087 | CCAGAUCGGUGC | 817 |
| 1559459 | fgauuccugcuL96 | | AfcCfgaucusgsg | | CGAUUCCUGCC | |
| AD- | csgscgacCfaUfGfU | 953 | asAfsgugAfuGfGfgaca | 1088 | AGCGCGACCAUG | 818 |
| 1559476 | fcccaucacuuL96 | | UfgGfucgcgscsu | | UCCCAUCACUG | |
| AD- | gsusacggCfaAfAfC | 954 | asGfsuccGfuUfGfuguu | 1089 | GGGUACGGCAAA | 819 |
| 1559481 | facaacggacuL96 | | UfgCfcguacscsc | | CACAACGGACC | |
| AD- | csasaacaCfaAfCfG | 955 | asGfscucAfgGfUfccgu | 1090 | GGCAAACACAAC | 820 |
| 1559487 | fgaccugagcuL96 | | UfgUfguuugscsc | | GGACCUGAGCA | |
| AD- | gsgsaccuGfaGfCfA | 956 | asUfsuauGfcCfAfgugc | 1091 | ACGGACCUGAGC | 821 |
| 1559497 | fcuggcauaauL96 | | UfcAfgguccsgsu | | ACUGGCAUAAG | |
| AD- | gsasgcacUfgGfCfA | 957 | asAfsaguCfcUfUfauge | 1092 | CUGAGCACUGGC | 822 |
| 1559503 | fuaaggacuuuL96 | | CfaGfugcucsasg | | AUAAGGACUUC | |
| AD- | gsusugacAfuCfGf | 958 | asGfsuauGfaGfUfgucg | 1093 | CUGUUGACAUCG | 823 |
| 1559514 | AfcacucauacuL96 | | AfuGfucaacsasg | | ACACUCAUACA | |
| AD- | ascsacucAfuAfCfA | 959 | asAfsuacUfuGfGfcugu | 1094 | CGACACUCAUAC | 824 |
| 1559524 | fgccaaguauuL96 | | AfuGfaguguscsg | | AGCCAAGUAUG | |
| AD- | usascagcCfaAfGfU | 960 | asAfsaggGfuCfAfuacu | 1095 | CAUACAGCCAAG | 825 |
| 1559531 | faugacccuuuL96 | | UfgGfcuguasusg | | UAUGACCCUUC | |
| AD- | csasaguaUfgAfCfC | 961 | asUfscagGfgAfAfgggu | 1096 | GCCAAGUAUGAC | 826 |
| 1559537 | fcuucccugauL96 | | CfaUfacuugsgsc | | CCUUCCCUGAA | |
| AD- | usgsucugUfuUfCf | 962 | asUfsugaUfcAfUfagga | 1097 | CCUGUCUGUUUC | 827 |
| 1559543 | CfuaugaucaauL96 | | AfaCfagacasgsg | | CUAUGAUCAAG | |
| AD- | cscsuaugAfuCfAfA | 963 | asGfsgaaGfuUfGfcuug | 1098 | UUCCUAUGAUCA | 828 |
| 1559552 | fgcaacuuccuL96 | | AfuCfauaggsasa | | AGCAACUUCCC | |
| AD- | csasagcaAfcUfUfC | 964 | asAfsuccUfcAfGfggaa | 1099 | AUCAAGCAACUU | 829 |
| 1559560 | fccugaggauuL96 | | GfuUfgcuugsasu | | CCCUGAGGAUC | |
| AD- | cscscugaGfgAfUfC | 965 | asAfsuugUfuGfAfggau | 1100 | UUCCCUGAGGAU | 830 |
| 1559570 | fcucaacaauuL96 | | CfcUfcagggsasa | | CCUCAACAAUG | |
| AD- | uscscucaAfcAfAfU | 966 | asAfsgcaUfgAfCfcauu | 1101 | GAUCCUCAACAA | 831 |
| 1559579 | fggucaugcuuL96 | | GfuUfgaggasusc | | UGGUCAUGCUU | |
| AD- | ascsaaugGfuCfAfU | 967 | asGfsuugAfaAfGfcaug | 1102 | CAACAAUGGUCA | 832 |
| 1559585 | fgcuuucaacuL96 | | AfcCfauugususg | | UGCUUUCAACG | |
| AD- | asusgcuuUfcAfAfC | 968 | asAfsaacUfcCfAfcguu | 1103 | UCAUGCUUUCAA | 833 |
| 1559594 | fguggaguuuuL96 | | GfaAfagcausgsa | | CGUGGAGUUUG | |
| AD- | asascgugGfaGfUfU | 969 | asGfsaguCfaUfCfaaac | 1104 | UCAACGUGGAGU | 834 |
| 1559602 | fugaugacucuL96 | | UfcCfacguusgsa | | UUGAUGACUCU | |
| AD- | usgsaugaCfuCfUfC | 970 | asCfsuuuGfuCfCfugag | 1105 | UUUGAUGACUCU | 835 |
| 1559613 | faggacaaaguL96 | | AfgUfcaucasasa | | CAGGACAAAGC | |
| AD- | uscsucagGfaCfAfA | 971 | asAfsgcaCfuGfCfuuug | 1106 | ACUCUCAGGACA | 836 |
| 1559620 | fagcagugcuuL96 | | UfcCfugagasgsu | | AAGCAGUGCUC | |
| AD- | gsascaaaGfcAfGfU | 972 | asCfsccuUfgAfGfcacu | 1107 | AGGACAAAGCAG | 837 |
| 1559626 | fgcucaaggguL96 | | GfcUfuugucscsu | | UGCUCAAGGGA | |
| AD- | usgsgcacUfuAfCfA | 973 | asGfsaauCfaAfUfcugu | 1108 | GAUGGCACUUAC | 838 |
| 1559638 | fgauugauucuL96 | | AfaGfugccasusc | | AGAUUGAUUCA | |
| AD- | ususacagAfuUfGf | 974 | asGfsaaaCfuGfAfauca | 1109 | ACUUACAGAUUG | 839 |
| 1559644 | AfuucaguuucuL96 | | AfuCfuguaasgsu | | AUUCAGUUUCA | |
| AD- | asusucagUfuUfCfA | 975 | asCfsaguGfaAfAfguga | 1110 | UGAUUCAGUUUC | 840 |
| 1559654 | fcuuucacuguL96 | | AfaCfugaauscsa | | ACUUUCACUGG | |
| AD- | uscsacuuGfaUfGfG | 976 | asGfsaacCfuUfGfucca | 1111 | GUUCACUUGAUG | 841 |
| 1559660 | facaagguucuL96 | | UfcAfagugasasc | | GACAAGGUUCA | |
| AD- | gsasuggaCfaAfGfG | 977 | asUfsgcuCfuGfAfaccu | 1112 | UUGAUGGACAAG | 842 |
| 1559666 | fuucagagcauL96 | | UfgUfccaucsasa | | GUUCAGAGCAU | |
| AD- | csasagguUfcAfGfA | 978 | asAfscagUfaUfGfcucu | 1113 | GACAAGGUUCAG | 843 |
| 1559672 | fgcauacuguuL96 | | GfaAfccuugsusc | | AGCAUACUGUG | |
| AD- | uscsagagCfaUfAfC | 979 | asUfsuauCfcAfCfagua | 1114 | GUUCAGAGCAUA | 844 |
| 1559678 | fuguggauaauL96 | | UfgCfucugasasc | | CUGUGGAUAAA | |
| AD- | asasgaaaUfaUfGfC | 980 | asAfsguuCfuGfCfagca | 1115 | AAAAGAAAUAUG | 845 |
| 1559699 | fugcagaacuuL96 | | UfaUfuucuususu | | CUGCAGAACUU | |
| AD- | usasugcuGfcAfGf | 981 | asAfsaguGfaAfGfuucu | 1116 | AAUAUGCUGCAG | 846 |
| 1559705 | AfacuucacuuuL96 | | GfcAfgcauasusu | | AACUUCACUUG | |
| AD- | gscsagaaCfuUfCfA | 982 | asUfsgaaCfcAfAfguga | 1117 | CUGCAGAACUUC | 847 |
| 1559711 | fcuugguucauL96 | | AfgUfucugcsasg | | ACUUGGUUCAC | |
| AD- | csusucacUfuGfGfU | 983 | asUfsuccAfgUfGfaacc | 1118 | AACUUCACUUGG | 848 |
| 1559717 | fucacuggaauL96 | | AfaGfugaagsusu | | UUCACUGGAAC | |
| AD- | uscsacugGfaAfCfA | 984 | asCfsauaUfuUfGfgugu | 1119 | GUUCACUGGAAC | 849 |
| 1559728 | fccaaauauguL96 | | UfcCfagugasasc | | ACCAAAUAUGG | |
| AD- | ususugggAfaAfGf | 985 | asUfsgcuGfcAfCfagcu | 1120 | AUUUUGGGAAAG | 850 |
| 1559735 | CfugugcagcauL96 | | UfuCfccaaasasu | | CUGUGCAGCAA | |
| AD- | gsusgcagCfaAfCfC | 986 | asAfsgucCfaUfCfaggu | 1121 | CUGUGCAGCAAC | 851 |
| 1559747 | fugauggacuuL96 | | UfgCfugcacsasg | | CUGAUGGACUG | |
| AD- | csasaccuGfaUfGIG | 987 | asAfscggCfcAfGfucca | 1122 | AGCAACCUGAUG | 852 |
| 1559753 | facuggecguuL96 | | UfcAfgguugscsu | | GACUGGCOGUU | |
| AD- | csusggccGfuUfCfU | 988 | asAfsaaaUfaCfCfuaga | 1123 | GACUGGCOGUUC | 853 |
| 1559765 | fagguauuuuuL96 | | AfcGfgccagsusc | | UAGGUAUUUUU | |
| AD- | usgsaaggUfuGfGf | 989 | asUfsuuaGfcGfCfugcc | 1124 | UUUGAAGGUUGG | 854 |
| 1559768 | CfagcgcuaaauL96 | | AfaCfcuucasasa | | CAGCGCUAAAC | |
| AD- | gscsagcgCfuAfAfA | 990 | asAfsaggCfcCfGfguuu | 1125 | UGGCAGCGCUAA | 855 |
| 1559777 | fccgggccuuuL96 | | AfgCfgcugcscsa | | ACCGGGCCUUC | |
| AD- | cscsgggcCfuUfCfA | 991 | asAfscaaCfuUfUfcuga | 1126 | AACCGGGCCUUC | 85€ |
| 1559788 | fgaaaguuguuL96 | | AfgGfcccggsusu | | AGAAAGUUGUU | |
| AD- | csusucagAfaAfGfU | 992 | asAfscauCfaAfCfaacu | 1127 | GCCUUCAGAAAG | 857 |
| 1559794 | fuguugauguuL96 | | UfuCfugaagsgsc | | UUGUUGAUGUG | |
| AD- | gsusuguuGfaUfGf | 993 | asGfsaauCfcAfGfcaca | 1128 | AAGUUGUUGAUG | 858 |
| 1559803 | UfgcuggauucuL96 | | UfcAfacaacsusu | | UGCUGGAUUCC | |
| AD- | gscsuggaUfuCfCfA | 994 | asUfsuguUfuUfAfaugg | 1129 | GUGCUGGAUUCC | 859 |
| 1559814 | fuuaaaacaauL96 | | AfaUfccagcsasc | | AUUAAAACAAA | |
| AD- | uscscauuAfaAfAfC | 995 | asUfsugcCfcUfUfuguu | 1130 | AUUCCAUUAAAA | 860 |
| 1559821 | faaagggcaauL96 | | UfuAfauggasasu | | CAAAGGGCAAG | |
| AD- | asasaacaAfaGfGfG | 996 | asGfscacUfcUfUfgccc | 1131 | UUAAAACAAAGG | 861 |
| 1559827 | fcaagagugcuL96 | | UfuUfguuuusasa | | GCAAGAGUGCU | |
| AD- | gsgscaagAfgUfGfC | 997 | asGfsugaAfgUfCfagca | 1132 | AGGGCAAGAGUG | 862 |
| 1559836 | fugacuucacuL96 | | CfuCfuugccscsu | | CUGACUUCACU | |
| AD- | gsusgcugAfcUfUf | 998 | asGfsaagUfuAfGfugaa | 1133 | GAGUGCUGACUU | 863 |
| 1559843 | CfacuaacuucuL96 | | GfuCfagcacsusc | | CACUAACUUCG | |
| AD- | ascsuucaCfuAfAfC | 999 | asAfsggaUfcGfAfaguu | 1134 | UGACUUCACUAA | 864 |
| 1559849 | fuucgauccuuL96 | | AfgUfgaaguscsa | | CUUCGAUCCUC | |
| AD- | csgsauccUfcGfUfG | 1000 | asGfsaagGfaGfGfccac | 1135 | UUCGAUCCUCGU | 865 |
| 1559862 | fgccuccuucuL96 | | GfaGfgaucgsasa | | GGCCUCCUUCC | |
| AD- | usesguggCfcUfCfC | 1001 | asAfsuucAfgGfAfagga | 1136 | CCUCGUGGCCUC | 866 |
| 1559868 | fuuccugaauuL96 | | GfgCfcacgasgsg | | CUUCCUGAAUC | |
| AD- | cscsuccuUfcCfUfG | 1002 | asCfscaaGfgAfUfucag | 1137 | GGCCUCCUUCCU | 867 |
| 1559874 | faaaccuugguL96 | | GfaAfggaggscsc | | GAAUCCUUGGA | |
| AD- | cscsugaaUfcCfUfU | 1003 | asCfsaguAfaUfCfcaag | 1138 | UUCCUGAAUCCU | 868 |
| 1559881 | fggauuacuguL96 | | GfaUfucaggsasa | | UGGAUUACUGG | |
| AD- | uscscuugGfaUfUf | 1004 | asUfsaggUfcCfAfguaa | 1139 | AAUCCUUGGAUU | 869 |
| 1559887 | AfcuggaccuauL96 | | UfcCfaaggasusu | | ACUGGACCUAC | |
| AD- | cscsuaccCfaGfGfC | 1005 | asGfsgucAfgUfGfagce | 1140 | GACCUACCCAGG | 870 |
| 1559903 | fucacugaccuL96 | | UfgGfguaggsusc | | CUCACUGACCA | |
| AD- | cscsucuuCfuGfGfA | 1006 | asGfsucaCfaCfAfuucc | 1141 | CUCCUCUUCUGG | 871 |
| 1559909 | faugugugacuL96 | | AfgAfagaggsasg | | AAUGUGUGACC | |
| AD- | usgsgaauGfuGfUf | 1007 | asAfsaucCfaGfGfucac | 1142 | UCUGGAAUGUGU | 872 |
| 1559916 | GfaccuggauuuL96 | | AfcAfuuccasgsa | | GACCUGGAUUG | |
| AD | usgsugacCfuGfGf | 1008 | asUfsgagCfaCfAfaucc | 1143 | UGUGUGACCUGG | 873 |
| 1559923 | AfuugugcucauL96 | | AfgGfucacascsa | | AUUGUGCUCAA | |
| AD- | csusggauUfgUfGf | 1009 | asGfsuucCfuUfGfagca | 1144 | ACCUGGAUUGUG | 874 |
| 1559929 | CfucaaggaacuL96 | | CfaAfuccagsgsu | | CUCAAGGAACC | |
| AD- | csuscaagGfaAfCfC | 1010 | asAfscgcUfgAfUfgggu | 1145 | UGCUCAAGGAAC | 875 |
| 1559939 | fcaucageguuL96 | | UfcCfuugagscsa | | CCAUCAGCGUC | |
| AD- | gsasacccAfuCfAfG | 1011 | asCfsugcUfgAfCfgcug | 1146 | AGGAACCCAUCA | 876 |
| 1559945 | fcgucagcaguL96 | | AfuGfgguucscsu | | GCGUCAGCAGC | |
| AD- | csgsagcaGfgUfGfU | 1012 | asGfsgaaUfuUfCfaaca | 1147 | AGCGAGCAGGUG | 877 |
| 1559965 | fugaaauuccuL96 | | CfcUfgcucgscsu | | UUGAAAUUCCG | |
| AD- | gsgsuguuGfaAfAf | 1013 | asGfsuuuAfcGfGfaauu | 1148 | CAGGUGUUGAAA | 878 |
| 1559971 | UfuccguaaacuL96 | | UfcAfacaccsusg | | UUCCGUAAACU | |
| AD- | gsasaauuCfcGfUfA | 1014 | asAfsguuAfaGfUfuuac | 1149 | UUGAAAUUCCGU | 879 |
| 1559977 | faacuuaacuuL96 | | GfgAfauuucsasa | | AAACUUAACUU | |
| AD- | cscsguaaAfcUfUfA | 1015 | asCfsauuGfaAfGfuuaa | 1150 | UUCCGUAAACUU | 880 |
| 1559983 | facuucaauguL96 | | GfuUfuacggsasa | | AACUUCAAUGG | |
| AD- | gsasggguGfaAfCfC | 1016 | asAfsguuCfuUfCfgggu | 1151 | GGGAGGGUGAAC | 881 |
| 1559987 | fcgaagaacuuL96 | | UfcAfcccucscsc | | CCGAAGAACUG | |
| AD- | gsasacccGfaAfGfA | 1017 | asAfsccaUfcAfGfuucu | 1152 | GUGAACCCGAAG | 882 |
| 1559993 | facugaugguuL96 | | UfcGfgguucsasc | | AACUGAUGGUG | |
| AD- | asgsaacuGfaUfGfG | 1018 | asAfsguuGfuCfCfacca | 1153 | GAAGAACUGAUG | 883 |
| 1560001 | fuggacaacuuL96 | | UfcAfguucususc | | GUGGACAACUG | |
| AD- | asusggugGfaCfAf | 1019 | asGfsggcGfcCfAfguug | 1154 | UGAUGGUGGACA | 884 |
| 1560008 | AfcuggcgcccuL96 | | UfcCfaccauscsa | | ACUGGCGCCCA | |
| AD- | cscsagcuCfaGfCfC | 1020 | asUfsucuUfcAfGfugge | 1155 | GCCCAGCUCAGC | 885 |
| 1560024 | facugaagaauL96 | | UfgAfgcuggsgsc | | CACUGAAGAAC | |
| AD- | csasgccaCfuGfAfA | 1021 | asUfsgccUfgUfUfcuuc | 1156 | CUCAGCCACUGA | 886 |
| 1560030 | fgaacaggcauL96 | | AfgUfggcugsasg | | AGAACAGGCAA | |
| AD- | csusgaagAfaCfAfG | 1022 | asUfsugaUfuUfGfccug | 1157 | CACUGAAGAACA | 887 |
| 1560036 | fgcaaaucaauL96 | | UfuCfuucagsusg | | GGCAAAUCAAA | |
| AD- | gsgscaaaUfcAfAfA | 1023 | asGfsaagGfaAfGfcuuu | 1158 | CAGGCAAAUCAA | 888 |
| 1560046 | fgcuuccuucuL96 | | GfaUfuugccsusg | | AGCUUCCUUCA | |
| AD- | csasaagcUfuCfCfU | 1024 | asCfsuuaUfuUfGfaagg | 1159 | AUCAAAGCUUCC | 889 |
| 1560053 | fucaaauaaguL96 | | AfaGfcuuugsasu | | UUCAAAUAAGA | |
| AD- | ususccuuCfaAfAfU | 1025 | asGfsaccAfuCfUfuauu | 1160 | GCUUCCUUCAAA | 890 |
| 1560059 | faagauggucuL96 | | UfgAfaggaasgsc | | UAAGAUGGUCC | |
| AD- | asusaagaUfgGfUfC | 1026 | asAfsgacUfaUfGfggac | 1161 | AAAUAAGAUGGU | 891 |
| 1560068 | fccanagucuuL96 | | CfaUfcuuaususu | | CCCAUAGUCUG | |
| AD- | usgsguccCfaUfAfG | 1027 | asGfsgauAfcAfGfacua | 1162 | GAUGGUCCCAUA | 892 |
| 1560074 | fucuguauccuL96 | | UfgGfgaccasusc | | GUCUGUAUCCA | |
| AD- | asusagucUfgUfAf | 1028 | asAfsuuaUfuUfGfgaua | 1163 | CCAUAGUCUGUA | 893 |
| 1560081 | UfccaaauaauuL96 | | CfaGfacuausgsg | | UCCAAAUAAUG | |
| AD- | gsusauccAfaAfUfA | 1029 | asAfsagaUfuCfAfuuau | 1164 | CUGUAUCCAAAU | 894 |
| 1560088 | faugaaucuuuL96 | | UfuGfgauacsasg | | AAUGAAUCUUC | |
| AD- | asusaaugAfaUfCfU | 1030 | asAfsacaCfcCfGfaaga | 1165 | AAAUAAUGAAUC | 895 |
| 1560096 | fucggguguuuL96 | | UfuCfauuaususu | | UUCGGGUGUUU | |
| AD- | asuscuucGfgGfUf | 1031 | asAfsaagGfgAfAfacac | 1166 | GAAUCUUCGGGU | 896 |
| 1560103 | GfuuucccuuuuL96 | | CfcGfaagaususc | | GUUUCCCUUUA | |
| AD- | gsgsguguUfuCfCf | 1032 | asUfsuagCfuAfAfaggg | 1167 | UCGGGUGUUUCC | 897 |
| 1560109 | CfuuuagcuaauL96 | | AfaAfcaccesgsa | | CUUUAGCUAAG | |
| AD- | cscscuuuAfgCfUfA | 1033 | asAfsucuGfuGfCfuuag | 1168 | UUCCCUUUAGCU | 898 |
| 1560117 | fagcacagauuL96 | | CfuAfaagggsasa | | AAGCACAGAUC | |
| AD- | asgscuaaGfcAfCfA | 1034 | asAfsgguAfgAfUfcugu | 1169 | UUAGCUAAGCAC | 899 |
| 1560123 | fgaucuaccuuL96 | | GfcUfuagcusasa | | AGAUCUACCUU | |
| AD- | csasgaucUfaCfCfU | 1035 | asAfsaauCfaCfCfaagg | 1170 | CACAGAUCUACC | 900 |
| 1560132 | fuggugauuuuL96 | | UfaGfaucugsusg | | UUGGUGAUUUG | |
| AD- | ascscuugGfuGfAf | 1036 | asAfsgggUfcCfAfaauc | 1171 | CUACCUUGGUGA | 901 |
| 1560139 | UfuuggacccuuL96 | | AfcCfaaggusasg | | UUUGGACCCUG | |
| AD- | ususggacCfcUfGfG | 1037 | asAfscaaAfgCfAfacca | 1172 | AUUUGGACCCUG | 902 |
| 1560150 | fuugcuuuguuL96 | | GfgGfuccaasasu | | GUUGCUUUGUG | |
| AD- | csusgguuGfcUfUf | 1038 | asAfscuaGfaCfAfcaaa | 1173 | CCCUGGUUGCUU | 903 |
| 1560157 | UfgugucuaguuL96 | | GfcAfaccagsgsg | | UGUGUCUAGUU | |
| AD- | gscsuuugUfgUfCf | 1039 | asUfsagaAfaAfCfuaga | 1174 | UUGCUUUGUGUC | 904 |
| 1560163 | UfaguuuucuauL96 | | CfaCfaaagcsasa | | UAGUUUUCUAG | |
| AD- | csusaguuUfuCfUf | 1040 | asUfsgaaGfgGfUfcuag | 1175 | GUCUAGUUUUCU | 905 |
| 1560172 | AfgacccuucauL96 | | AfaAfacuagsasc | | AGACCCUUCAU | |
| AD- | ususcuagAfcCfCfU | 1041 | asAfsagaGfaUfGfaagg | 1176 | UUUUCUAGACCC | 906 |
| 1560178 | fucaucucuuuL96 | | GfuCfuagaasasa | | UUCAUCUCUUA | |
| AD- | ascsccuuCfaUfCfU | 1042 | asUfscaaGfuAfAfgaga | 1177 | AGACCCUUCAUC | 907 |
| 1560184 | fcunacuugauL96 | | UfgAfaggguscsu | | UCUUACUUGAU | |
| AD- | asuscucuUfaCfUfU | 1043 | asAfsaguCfuAfUfcaag | 1178 | UCAUCUCUUACU | 908 |
| 1560191 | fgauagacuuuL96 | | UfaAfgagausgsa | | UGAUAGACUUA | |
| AD- | usascuugAfuAfGf | 1044 | asAfsuuaGfuAfAfgucu | 1179 | CUUACUUGAUAG | 909 |
| 1560197 | AfcuuacuaauuL96 | | AfuCfaaguasasg | | ACUUACUAAUA | |
| AD- | csusuacuAfaUfAfA | 1045 | asCfsuucAfcAfUfuuua | 1180 | GACUUACUAAUA | 910 |
| 1560205 | faaugugaaguL96 | | UfuAfguaagsusc | | AAAUGUGAAGA | |
| AD- | asasaaugUfgAfAfG | 1046 | asUfsgguCfuAfGfucuu | 1181 | AUAAAAUGUGAA | 911 |
| 1560214 | facuagaccauL96 | | CfaCfauuuusasu | | GACUAGACCAA | |
| AD | usgsaagaCfuAfGfA | 1047 | asGfsacaAfuUfGfgucu | 1182 | UGUGAAGACUAG | 912 |
| 1560220 | fccaauugucuL96 | | AfgUfcuucascsa | | ACCAAUUGUCA | |
| AD- | usasgaccAfaUfUfG | 1048 | asCfsaagCfaUfGfacaa | 1183 | ACUAGACCAAUU | 913 |
| 1560227 | fucaugcunguL96 | | UfuGfgucuasgsu | | GUCAUGCUUGA | |
| AD- | uscsaugcUfuGfAfC | 1049 | asAfsgcaGfuUfGfuguc | 1184 | UGUCAUGCUUGA | 914 |
| 1560238 | facaacugcuuL96 | | AfaGfcaugascsa | | CACAACUGCUG | |
| AD- | ususgacaCfaAfCfU | 1050 | asAfsgccAfcAfGfcagu | 1185 | GCUUGACACAAC | 915 |
| 1560244 | fgcuguggcuuL96 | | UfgUfgucaasgsc | | UGCUGUGGCUG | |
| AD- | csusguggCfuGfGf | 1051 | asAfsaagCfaCfCfaacc | 1186 | UGCUGUGGCUGG | 916 |
| 1560256 | UfuggugcuuuuL96 | | AfgCfcacagscsa | | UUGGUGCUUUG | |
| AD- | csusgguuGfgUfGf | 1052 | asAfsuaaAfcAfAfagca | 1187 | GGCUGGUUGGUG | 917 |
| 1560262 | CfuuuguuuauuL96 | | CfcAfaccagscse | | CUUUGUUUAUG | |
| AD- | gsgsugcuUfuGfUf | 1053 | asAfscuaCfcAfUfaaac | 1188 | UUGGUGCUUUGU | 918 |
| 1560268 | UfuaugguaguuL96 | | AfaAfgcaccsasa | | UUAUGGUAGUA | |
| AD- | ususguuuAfuGfGf | 1054 | asAfsaaaCfuAfCfuacc | 1189 | CUUUGUUUAUGG | 919 |
| 1560274 | UfaguaguuuuuL96 | | AfuAfaacaasasg | | UAGUAGUUUUU | |
| AD- | usgsguagUfaGfUf | 1055 | asUfsuacAfgAfAfaaac | 1190 | UAUGGUAGUAGU | 920 |
| 1560280 | UfuuucuguaauL96 | | UfaCfuaccasusa | | UUUUCUGUAAC | |
| AD- | usasguuuUfuCfUf | 1056 | asUfscugUfgUfUfacag | 1191 | AGUAGUUUUUCU | 921 |
| 1560286 | GfuaacacagauL96 | | AfaAfaacuascsu | | GUAACACAGAA | |
| AD- | ususcuguAfaCfAfC | 1057 | asCfsuauAfuUfCfugug | 1192 | UUUUCUGUAACA | 922 |
| 1560292 | fagaauauaguL96 | | UfuAfcagaasasa | | CAGAAUAUAGG | |
| AD- | csascagaAfuAfUfA | 1058 | asUfsucuUfaUfCfcuau | 1193 | AACACAGAAUAU | 923 |
| 1560300 | fggauaagaauL96 | | AfuUfcugugsusu | | AGGAUAAGAAA | |
| AD- | asgsaauaAfaGfUfA | 1059 | asAfsaguCfaAfGfguac | 1194 | UAAGAAUAAAGU | 924 |
| 1560311 | fccuugacuuuL96 | | UfuUfauucususa | | ACCUUGACUUU | |
| AD- | csusugacUfuUfGf | 1060 | asAfsugcUfgUfGfaaca | 1195 | ACCUUGACUUUG | 925 |
| 1560323 | UfucacagcauuL96 | | AfaGfucaagsgsu | | UUCACAGCAUG | |
| AD- | ususuguuCfaCfAf | 1061 | asCfsccuAfcAfUfgcug | 1196 | ACUUUGUUCACA | 926 |
| 1560329 | GfcauguaggguL96 | | UfgAfacaaasgsu | | GCAUGUAGGGU | |
| AD- | csascagcAfuGfUfA | 1062 | asUfscauCfaCfCfcuac | 1197 | UUCACAGCAUGU | 927 |
| 1560335 | fgggugaugauL96 | | AfuGfcugugsasa | | AGGGUGAUGAG | |
| AD- | usasggguGfaUfGf | 1063 | asUfsgugAfgUfGfcuca | 1198 | UGUAGGGUGAUG | 928 |
| 1560344 | AfgcacucacauL96 | | UfcAfcccuascsa | | AGCACUCACAA | |
| AD- | gsasugagCfaCfUfC | 1064 | asAfsacaAfuUfGfugag | 1199 | GUGAUGAGCACU | 929 |
| 1560350 | facaauuguuuL96 | | UfgCfucaucsasc | | CACAAUUGUUG | |
| AD- | ascsucacAfaUfUfG | 1065 | asUfsuuaGfuCfAfacaa | 1200 | GCACUCACAAUU | 930 |
| 1560357 | fuugacuaaauL96 | | UfuGfugagusgsc | | GUUGACUAAAA | |
| AD- | ususgacuAfaAfAf | 1066 | asAfsaaaGfcAfGfcauu | 1201 | UGUUGACUAAAA | 931 |
| 1560368 | UfgcugcuuuuuL96 | | UfuAfgucaascsa | | UGCUGCUUUUA | |
| AD- | asusgcugCfuUfUf | 1067 | asCfsuauGfuUfUfuaaa | 1202 | AAAUGCUGCUUU | 932 |
| 1560377 | UfaaaacauaguL96 | | AfgCfagcaususu | | UAAAACAUAGG | |
| AD- | csusuuuaAfaAfCfA | 1068 | asAfscuuUfcCfUfaugu | 1203 | UGCUUUUAAAAC | 933 |
| 1560383 | fuaggaaaguuL96 | | UfuUfaaaagscsa | | AUAGGAAAGUA | |
| AD- | csasuaggAfaAfGfU | 1069 | asAfsaccAfuUfCfuacu | 1204 | AACAUAGGAAAG | 934 |
| 1560392 | fagaaugguuuL96 | | UfuCfcuaugsusu | | UAGAAUGGUUG | |
| AD- | asgsuagaAfuGfGf | 1070 | asUfsugcAfcUfCfaacc | 1205 | AAAGUAGAAUGG | 935 |
| 1560400 | UfugagugcaauL96 | | AfuUfcuacususu | | UUGAGUGCAAA | |
| AD- | asusgguuGfaGfUf | 1071 | asAfsuggAfuUfUfgcac | 1206 | GAAUGGUUGAGU | 936 |
| 1560406 | GfcaaauccauuL96 | | UfcAfaccaususc | | GCAAAUCCAUA | |
| AD- | asgsugcaAfaUfCfC | 1072 | asUfsuguGfcUfAfugga | 1207 | UGAGUGCAAAUC | 937 |
| 1560413 | fauagcacaauL96 | | UfuUfgcacuscsa | | CAUAGCACAAG | |
| AD- | uscscauaGfcAfCfA | 1073 | asAfsauuUfaUfCfuugu | 1208 | AAUCCAUAGCAC | 938 |
| 1560421 | fagauaaauuuL96 | | GfcUfauggasusu | | AAGAUAAAUUG | |
| AD- | csasagauAfaAfUfU | 1074 | asAfsacuAfgCfUfcaau | 1209 | CACAAGAUAAAU | 939 |
| 1560430 | fgagcuaguuuL96 | | UfuAfucuugsusg | | UGAGCUAGUUA | |
| AD- | gsasgcuaGfuUfAf | 1075 | asUfsgauUfuGfCfcuua | 1210 | UUGAGCUAGUUA | 940 |
| 1560441 | AfggcanaucauL96 | | AfcUfagcucsasa | | AGGCAAAUCAG | |
| AD- | usasaggcAfaAfUfC | 1076 | asAfsuuuUfaCfCfugau | 1211 | GUUAAGGCAAAU | 941 |
| 1560449 | fagguaaaauuL96 | | UfuGfccuuasasc | | CAGGUAAAAUA | |
| AD- | asgsguaaAfaUfAfG | 1077 | asGfsaauCfaUfGfacua | 1212 | UCAGGUAAAAUA | 942 |
| 1560460 | fucaugauucuL96 | | UfuUfuaccusgsa | | GUCAUGAUUCU | |
| AD- | gsuscaugAfuUfCf | 1078 | asAfscauUfaCfAfuaga | 1213 | UAGUCAUGAUUC | 943 |
| 1560470 | UfauguaauguuL96 | | AfuCfaugacsusa | | UAUGUAAUGUA | |
| AD- | usasuguaAfuGfUf | 1079 | asUfsuucUfgGfUfuuac | 1214 | UCUAUGUAAUGU | 944 |
| 1560480 | AfaaccagaaauL96 | | AfuUfacauasgsa | | AAACCAGAAAA | |
| AD- | uscsaugaUfuUfCfA | 1080 | asAfsuaaCfaUfCfuuga | 1215 | GUUCAUGAUUUC | 945 |
| 1560492 | fagauguuauuL96 | | AfaUfcaugasasc | | AAGAUGUUAUA | |
| AD- | csusuuugAfaUfUf | 1081 | asAfsuauCfuCfUfguaa | 1216 | GACUUUUGAAUU | 946 |
| 1560528 | AfcagagauauuL96 | | UfuCfaaaagsusc | | ACAGAGAUAUA | |
| AD- | ususagagUfuGfUf | 1082 | asAfscucUfgUfAfucac | 1217 | AAUUAGAGUUGU | 947 |
| 1560556 | GfauacagaguuL96 | | AfaCfucuaasusu | | GAUACAGAGUA | |
| AD- | ususgugaUfaCfAf | 1083 | asAfsaauAfuAfCfucug | 1218 | AGUUGUGAUACA | 948 |
| 1560562 | GfaguauauuuuL96 | | UfaUfcacaascsu | | GAGUAUAUUUC | |
| AD- | usascagaGfuAfUfA | 1084 | asGfsaauGfgAfAfauau | 1219 | GAUACAGAGUAU | 949 |
| 1560568 | fuuuccauucuL96 | | AfcUfcuguasusc | | AUUUCCAUUCA | |
| AD- | asusauuuCfcAfUfU | 1085 | asUfsauuGfuCfUfgaau | 1220 | GUAUAUUUCCAU | 950 |
| 1560576 | fcagacaauauL96 | | GfgAfaauausasc | | UCAGACAAUAU | |
| AD- | asuscagaCfaAfUfA | 1086 | asGfsuuaUfgAfUfauau | 1221 | CAUUCAGACAAU | 951 |
| 1560585 | fuaucauaacuL96 | | UfgUfcugaasusg | | AUAUCAUAACU | |

TABLE 7
Unmodified Sense and Antisense Strand Sequences of CA2 dsRNA Agents

| | | SEQ | Range in | | SEQ | Range in |
|---|---|---|---|---|---|---|
| Duplex | Sense Sequence | ID | NM_ | Antisense Sequence | ID | NM_ |
| Name | 5′ to 3′ | NO: | 000067.3 | 5′ to 3′ | NO: | 000067.3 |
| AD- | UGUUUCCUAUGA | 1222 | 219-239 | UUUGCUTGAUCA | 1533 | 217-239 |
| 1784188.1 | UCAAGCAAA | | | UAGGAAACAGA | | |
| AD- | UGACUUCACUAA | 1223 | 594-614 | UGAUCGAAGUUA | 1534 | 592-614 |
| 1784189.1 | CUUCGAUCA | | | GUGAAGUCAGC | | |
| AD- | CAAAGCUUCCUU | 1224 | 840-860 | UCUUAUUUGAAG | 1535 | 838-860 |
| 1784190.1 | CAAAUAAGA | | | GAAGCUUUGAU | | |
| AD- | UCAAAGCUUCCU | 1225 | 839-859 | UUUATUTGAAGG | 1536 | 837-859 |
| 1784191.1 | UCAAAUAAA | | | AAGCUUUGAUU | | |
| AD- | GUCUGUAUCCAA | 1226 | 871-891 | UUUCAUUAUUUG | 1537 | 869-891 |
| 1784192.1 | AUAAUGAAA | | | GAUACAGACUA | | |
| AD- | GUCUGUAUCCAA | 1226 | 871-891 | UUUCAUTAUUUG | 1538 | 869-891 |
| 1784193.1 | AUAAUGAAA | | | GAUACAGACUA | | |
| AD- | AUUCCGUAAACU | 1227 | 747-767 | UUGAAGTUAAGU | 1539 | 745-767 |
| 1784194.1 | UAACUUCAA | | | UUACGGAAUUU | | |
| AD- | UCCUAUGAUCAA | 1228 | 223-243 | UGAAGUTGCUUG | 1540 | 221-243 |
| 1784195.1 | GCAACUUCA | | | AUCAUAGGAAA | | |
| AD- | GUUUCCUAUGAU | 1229 | 220-240 | UGUUGCTUGAUC | 1541 | 218-240 |
| 1784196.1 | CAAGCAACA | | | AUAGGAAACAG | | |
| AD- | AUGCUGCUUUUA | 1230 | 1180- | UCUATGTUUUAA | 1542 | 1178- |
| 1784197.1 | AAACAUAGA | | 1200 | AAGCAGCAUUU | | 1200 |
| AD- | CAUUCAGACAAU | 1231 | 1490- | UUAUGATAUAUU | 1543 | 1488- |
| 1784198.1 | AUAUCAUAA | | 1510 | GUCUGAAUGGA | | 1510 |
| AD- | GACUUCACUAAC | 1232 | 595-615 | UGGAUCGAAGUU | 1544 | 593-615 |
| 1784199.1 | UUCGAUCCA | | | AGUGAAGUCAG | | |
| AD- | CCAUUCAGACAA | 1233 | 1489- | UAUGAUAUAUUG | 1545 | 1487- |
| 1784200.1 | UAUAUCAUA | | 1509 | UCUGAAUGGAA | | 1509 |
| AD- | UCUGUAUCCAAA | 1234 | 872-892 | UAUUCATUAUUU | 1546 | 870-892 |
| 1784201.1 | UAAUGAAUA | | | GGAUACAGACU | | |
| AD | AAUCAAAGCUUC | 1235 | 837-857 | UAUUTGAAGGAA | 1547 | 835-857 |
| 1784202.1 | CUUCAAAUA | | | GCUUUGAUUUG | | |
| AD- | AUUCAGACAAUA | 1236 | 1491- | UUUATGAUAUAU | 1548 | 1489- |
| 1784203.1 | UAUCAUAAA | | 1511 | UGUCUGAAUGG | | 1511 |
| AD- | CCGUAAACUUAA | 1237 | 750-770 | UCAUUGAAGUUA | 1549 | 748-770 |
| 1784204.1 | CUUCAAUGA | | | AGUUUACGGAA | | |
| AD- | CCGUAAACUUAA | 1237 | 750-770 | UCAUTGAAGUUA | 1550 | 748-770 |
| 1784205.1 | CUUCAAUGA | | | AGUUUACGGAA | | |
| AD- | GUGCUGACUUCA | 1238 | 590-610 | UGAAGUTAGUGA | 1551 | 588-610 |
| 1784206.1 | CUAACUUCA | | | AGUCAGCACUC | | |
| AD- | AAGCUUCCUUCA | 1239 | 842-862 | UAUCUUAUUUGA | 1552 | 840-862 |
| 1784207.1 | AAUAAGAUA | | | AGGAAGCUUUG | | |
| AD- | AAGCUUCCUUCA | 1239 | 842-862 | UAUCTUAUUUGA | 1553 | 840-862 |
| 1784208.1 | AAUAAGAUA | | | AGGAAGCUUUG | | |
| AD- | AAAUUCCGUAAA | 1240 | 745-765 | UAAGUUAAGUUU | 1554 | 743-765 |
| 1784209.1 | CUUAACUUA | | | ACGGAAUUUCA | | |
| AD- | CUGUCUGUUUCC | 1241 | 214-234 | UUGATCAUAGGA | 1555 | 212-234 |
| 1784210.1 | UAUGAUCAA | | | AACAGACAGGG | | |
| AD- | GUAUCCAAAUAA | 1242 | 875-895 | UAAGAUUCAUUA | 1556 | 873-895 |
| 1784211.1 | UGAAUCUUA | | | UUUGGAUACAG | | |
| AD- | GUAUCCAAAUAA | 1242 | 875-895 | UAAGAUTCAUUA | 1557 | 873-895 |
| 1784212.1 | UGAAUCUUA | | | UUUGGAUACAG | | |
| AD- | CUGACUUCACUA | 1243 | 593-613 | UAUCGAAGUUAG | 1558 | 591-613 |
| 1784213.1 | ACUUCGAUA | | | UGAAGUCAGCA | | |
| AD- | GCUUCCUUCAAA | 1244 | 844-864 | UCCAUCUUAUUU | 1559 | 842-864 |
| 1784214.1 | UAAGAUGGA | | | GAAGGAAGCUU | | |
| AD- | GCUUCCUUCAAA | 1244 | 844-864 | UCCATCTUAUUU | 1560 | 842-864 |
| 1784215.1 | UAAGAUGGA | | | GAAGGAAGCUU | | |
| AD- | AAAUCAAAGCUU | 1245 | 836-856 | UUUUGAAGGAAG | 1561 | 834-856 |
| 1784216.1 | CCUUCAAAA | | | CUUUGAUUUGC | | |
| AD- | AGCUUCCUUCAA | 1246 | 843-863 | UCAUCUUAUUUG | 1562 | 841-863 |
| 1784217.1 | AUAAGAUGA | | | AAGGAAGCUUU | | |
| AD- | UGCUGCUUUUAA | 1247 | 1181- | UCCUAUGUUUUA | 1563 | 1179- |
| 1784218.1 | AACAUAGGA | | 1201 | AAAGCAGCAUU | | 1201 |
| AD- | AGGCAAAUCAAA | 1248 | 832-852 | UAAGGAAGCUUU | 1564 | 830-852 |
| 1784219.1 | GCUUCCUUA | | | GAUUUGCCUGU | | |
| AD- | AGGCAAAUCAAA | 1248 | 832-852 | UAAGGAAGCUUU | 1564 | 830-852 |
| 1784220.1 | GCUUCCUUA | | | GAUUUGCCUGU | | |
| AD- | GGCAAAUCAAAG | 1249 | 833-853 | UGAAGGAAGCUU | 1565 | 831-853 |
| 1784221.1 | CUUCCUUCA | | | UGAUUUGCCUG | | |
| AD- | AAAGCUUCCUUC | 1250 | 841-861 | UUCUUAUUUGAA | 1566 | 839-861 |
| 1784222.1 | AAAUAAGAA | | | GGAAGCUUUGA | | |
| AD- | AAAGCUUCCUUC | 1250 | 841-861 | UUCUTATUUGAA | 1567 | 839-861 |
| 1784223.1 | AAAUAAGAA | | | GGAAGCUUUGA | | |
| AD- | UAAAAUGCUGCU | 1251 | 1176- | UGUUUUAAAAGC | 1568 | 1174- |
| 1784224.1 | UUUAAAACA | | 1196 | AGCAUUUUAGU | | 1196 |
| AD- | AAGAAUAAAGUA | 1252 | 1113- | UAGUCAAGGUAC | 1569 | 1111- |
| 1784225.1 | CCUUGACUA | | 1133 | UUUAUUCUUAU | | 1133 |
| AD- | AGAAUAAAGUAC | 1253 | 1114- | UAAGUCAAGGUA | 1570 | 1112- |
| 1784226.1 | CUUGACUUA | | 1134 | CUUUAUUCUUA | | 1134 |
| AD- | AGAAUAAAGUAC | 1253 | 1114- | UAAGTCAAGGUA | 1571 | 1112- |
| 1784227.1 | CUUGACUUA | | 1134 | CUUUAUUCUUA | | 1134 |
| AD- | GUCUGUUUCCUA | 1254 | 216-236 | UCUUGATCAUAG | 1572 | 214-236 |
| 1784228.1 | UGAUCAAGA | | | GAAACAGACAG | | |
| AD- | UCCGUAAACUUA | 1255 | 749-769 | UAUUGAAGUUAA | 1573 | 747-769 |
| 1784229.1 | ACUUCAAUA | | | GUUUACGGAAU | | |
| AD- | CCUCUUCUGGAA | 1256 | 676-696 | UGUCACACAUUC | 1574 | 674-696 |
| 1784230.1 | UGUGUGACA | | | CAGAAGAGGAG | | |
| AD- | UAUCCAAAUAAU | 1257 | 876-896 | UGAAGATUCAUU | 1575 | 874-896 |
| 1784231.1 | GAAUCUUCA | | | AUUUGGAUACA | | |
| AD- | UCUGUUUCCUAU | 1258 | 217-237 | UGCUTGAUCAUA | 1576 | 215-237 |
| 1784232.1 | GAUCAAGCA | | | GGAAACAGACA | | |
| AD- | GUUGACAUCGAC | 1259 | 166-186 | UGUATGAGUGUC | 1577 | 164-186 |
| 1784233.1 | ACUCAUACA | | | GAUGUCAACAG | | |
| AD- | AAGUACCUUGAC | 1260 | 1120- | UUGAACAAAGUC | 1578 | 1118- |
| 1784234.1 | UUUGUUCAA | | 1140 | AAGGUACUUUA | | 1140 |
| AD- | AAGUACCUUGAC | 1260 | 1120- | UUGAACAAAGUC | 1578 | 1118- |
| 1784235.1 | UUUGUUCAA | | 1140 | AAGGUACUUUA | | 1140 |
| AD- | CAGAUCUACCUU | 1261 | 919-939 | UAAATCACCAAG | 1579 | 917-939 |
| 1784236.1 | GGUGAUUUA | | | GUAGAUCUGUG | | |
| AD- | CUGGAUUGUGCU | 1262 | 696-716 | UGUUCCTUGAGC | 1580 | 694-716 |
| 1784237.1 | CAAGGAACA | | | ACAAUCCAGGU | | |
| AD- | UGCUUUUAAAAC | 1263 | 1184- | UUUUCCTAUGUU | 1581 | 1182- |
| 1784238.1 | AUAGGAAAA | | 1204 | UUAAAAGCAGC | | 1204 |
| AD- | UGCUGACUUCAC | 1264 | 591-611 | UCGAAGUUAGUG | 1582 | 589-611 |
| 1784239.1 | UAACUUCGA | | | AAGUCAGCACU | | |
| AD- | UGCUGACUUCAC | 1264 | 591-611 | UCGAAGTUAGUG | 1583 | 589-611 |
| 1784240.1 | UAACUUCGA | | | AAGUCAGCACU | | |
| AD- | GAAAUUCCGUAA | 1265 | 744-764 | UAGUUAAGUUUA | 1584 | 742-764 |
| 1784241.1 | ACUUAACUA | | | CGGAAUUUCAA | | |
| AD- | GAAAUUCCGUAA | 1265 | 744-764 | UAGUTAAGUUUA | 1585 | 742-764 |
| 1784242.1 | ACUUAACUA | | | CGGAAUUUCAA | | |
| AD- | UAAGGCAAAUCA | 1266 | 1252- | UAUUUUACCUGA | 1586 | 1250- |
| 1784243.1 | GGUAAAAUA | | 1272 | UUUGCCUUAAC | | 1272 |
| AD- | UAAGGCAAAUCA | 1266 | 1252- | UAUUTUACCUGA | 1587 | 1250- |
| 1784244.1 | GGUAAAAUA | | 1272 | UUUGCCUUAAC | | 1272 |
| AD- | GUUCUAGGUAUU | 1267 | 499-519 | UUUCAAAAAAAU | 1588 | 497-519 |
| 1784245.1 | UUUUUGAAA | | | ACCUAGAACGG | | |
| AD- | AAGAUAAAUUGA | 1268 | 1234- | UUAACUAGCUCA | 1589 | 1232- |
| 1784246.1 | GCUAGUUAA | | 1254 | AUUUAUCUUGU | | 1254 |
| AD- | UUAGCUAAGCAC | 1269 | 908-928 | UGUAGATCUGUG | 1590 | 906-928 |
| 1784247.1 | AGAUCUACA | | | CUUAGCUAAAG | | |
| AD- | CUUCACUAACUU | 1270 | 597-617 | UGAGGATCGAAG | 1591 | 595-617 |
| 1784248.1 | CGAUCCUCA | | | UUAGUGAAGUC | | |
| AD- | AAUUCCGUAAAC | 1271 | 746-766 | UGAAGUTAAGUU | 1592 | 744-766 |
| 1784249.1 | UUAACUUCA | | | UACGGAAUUUC | | |
| AD- | CUGCUUUUAAAA | 1272 | 1183- | UUUCCUAUGUUU | 1593 | 1181- |
| 1784250.1 | CAUAGGAAA | | 1203 | UAAAAGCAGCA | | 1203 |
| AD- | CUGUUGACAUCG | 1273 | 164-184 | UAUGAGTGUCGA | 1594 | 162-184 |
| 1784251.1 | ACACUCAUA | | | UGUCAACAGGG | | |
| AD- | UUCACUAACUUC | 1274 | 598-618 | UCGAGGAUCGAA | 1595 | 596-618 |
| 1784252.1 | GAUCCUCGA | | | GUUAGUGAAGU | | |
| AD- | GCUAAGCACAGA | 1275 | 911-931 | UAAGGUAGAUCU | 1596 | 909-931 |
| 1784253.1 | UCUACCUUA | | | GUGCUUAGCUA | | |
| AD- | UAAAGUACCUUG | 1276 | 1118- | UAACAAAGUCAA | 1597 | 1116- |
| 1784254.1 | ACUUUGUUA | | 1138 | GGUACUUUAUU | | 1138 |
| AD- | AAAAUGCUGCUU | 1277 | 1177- | UUGUTUTAAAAG | 1598 | 1175- |
| 1784255.1 | UUAAAACAA | | 1197 | CAGCAUUUUAG | | 1197 |
| AD- | GCUGCUUUUAAA | 1278 | 1182- | UUCCUAUGUUUU | 1599 | 1180- |
| 1784256.1 | ACAUAGGAA | | 1202 | AAAAGCAGCAU | | 1202 |
| AD- | GCUGCUUUUAAA | 1278 | 1182- | UUCCTATGUUUU | 1600 | 1180- |
| 1784257.1 | ACAUAGGAA | | 1202 | AAAAGCAGCAU | | 1202 |
| AD- | UCAUGAUUCUAU | 1279 | 1274- | UUACAUUACAUA | 1601 | 1272- |
| 1784258.1 | GUAAUGUAA | | 1294 | GAAUCAUGACU | | 1294 |
| AD- | UCAUGAUUCUAU | 1279 | 1274- | UUACAUTACAUA | 1602 | 1272- |
| 1784259.1 | GUAAUGUAA | | 1294 | GAAUCAUGACU | | 1294 |
| AD- | AGUGCUGACUUC | 1280 | 589-609 | UAAGUUAGUGAA | 1603 | 587-609 |
| 1784260.1 | ACUAACUUA | | | GUCAGCACUCU | | |
| AD- | CUAAGCACAGAU | 1281 | 912-932 | UCAAGGTAGAUC | 1604 | 910-932 |
| 1784261.1 | CUACCUUGA | | | UGUGCUUAGCU | | |
| AD- | CACUAACUUCGA | 1282 | 600-620 | UCACGAGGAUCG | 1605 | 598-620 |
| 1784262.1 | UCCUCGUGA | | | AAGUUAGUGAA | | |
| AD- | CUGAAGAACAGG | 1283 | 823-843 | UUUGAUTUGCCU | 1606 | 821-843 |
| 1784263.1 | CAAAUCAAA | | | GUUCUUCAGUG | | |
| AD- | AAAGUACCUUGA | 1284 | 1119- | UGAACAAAGUCA | 1607 | 1117- |
| 1784264.1 | CUUUGUUCA | | 1139 | AGGUACUUUAU | | 1139 |
| AD- | GCUUUGUUUAUG | 1285 | 1061- | UACUACTACCAU | 1608 | 1059- |
| 1784265.1 | GUAGUAGUA | | 1081 | AAACAAAGCAC | | 1081 |
| AD- | CAUGAUUCUAUG | 1286 | 1275- | UUUACATUACAU | 1609 | 1273- |
| 1784266.1 | UAAUGUAAA | | 1295 | AGAAUCAUGAC | | 1295 |
| AD- | CGUUCUAGGUAU | 1287 | 498-518 | UUCAAAAAAAUA | 1610 | 496-518 |
| 1784267.1 | UUUUUUGAA | | | CCUAGAACGGC | | |
| AD- | UUCUAGGUAUUU | 1288 | 500-520 | UCUUCAAAAAAA | 1611 | 498-520 |
| 1784268.1 | UUUUGAAGA | | | UACCUAGAACG | | |
| AD- | UCCUUCCUGAAU | 1289 | 623-643 | UAUCCAAGGAUU | 1612 | 621-643 |
| 1784269.1 | CCUUGGAUA | | | CAGGAAGGAGG | | |
| AD- | UCCUUCCUGAAU | 1289 | 623-643 | UAUCCAAGGAUU | 1612 | 621-643 |
| 1784270.1 | CCUUGGAUA | | | CAGGAAGGAGG | | |
| AD- | GACUAAAAUGCU | 1290 | 1173- | UUUAAAAGCAGC | 1613 | 1171- |
| 1784271.1 | GCUUUUAAA | | 1193 | AUUUUAGUCAA | | 1193 |
| AD- | GACUAAAAUGCU | 1290 | 1173- | UUUAAAAGCAGC | 1613 | 1171- |
| 1784272.1 | GCUUUUAAA | | 1193 | AUUUUAGUCAA | | 1193 |
| AD- | AACAGGCAAAUC | 1291 | 829-849 | UGAAGCTUUGAU | 1614 | 827-849 |
| 1784273.1 | AAAGCUUCA | | | UUGCCUGUUCU | | |
| AD- | CCUUCCUGAAUC | 1292 | 624-644 | UAAUCCAAGGAU | 1615 | 622-644 |
| 1784274.1 | CUUGGAUUA | | | UCAGGAAGGAG | | |
| AD- | UGAUGACUCUCA | 1293 | 285-305 | UCUUTGTCCUGA | 1616 | 283-305 |
| 1784275.1 | GGACAAAGA | | | GAGUCAUCAAA | | |
| AD- | UGGAGUUUGAUG | 1294 | 278-298 | UCUGAGAGUCAU | 1617 | 276-298 |
| 1784276.1 | ACUCUCAGA | | | CAAACUCCACG | | |
| AD- | AUCCAAAUAAUG | 1295 | 877-897 | UCGAAGAUUCAU | 1618 | 875-897 |
| 1784277.1 | AAUCUUCGA | | | UAUUUGGAUAC | | |
| AD- | AUCCAAAUAAUG | 1295 | 877-897 | UCGAAGAUUCAU | 1618 | 875-897 |
| 1784278.1 | AAUCUUCGA | | | UAUUUGGAUAC | | |
| AD- | UUGACUUUGUUC | 1296 | 1127- | UCAUGCTGUGAA | 1619 | 1125- |
| 1784279.1 | ACAGCAUGA | | 1147 | CAAAGUCAAGG | | 1147 |
| AD- | AGAUCUACCUUG | 1297 | 920-940 | UCAAAUCACCAA | 1620 | 918-940 |
| 1784280.1 | GUGAUUUGA | | | GGUAGAUCUGU | | |
| AD- | AUGGUAGUAGUU | 1298 | 1070- | UUACAGAAAAAC | 1621 | 1068- |
| 1784281.1 | UUUCUGUAA | | 1090 | UACUACCAUAA | | 1090 |
| AD- | AUGGUAGUAGUU | 1298 | 1070- | UUACAGAAAAAC | 1621 | 1068- |
| 1784282.1 | UUUCUGUAA | | 1090 | UACUACCAUAA | | 1090 |
| AD- | CCUUGACUUUGU | 1299 | 1125- | UUGCTGTGAACA | 1622 | 1123- |
| 1784283.1 | UCACAGCAA | | 1145 | AAGUCAAGGUA | | 1145 |
| AD- | CCUGGAUUGUGC | 1300 | 695-715 | UUUCCUTGAGCA | 1623 | 693-715 |
| 1784284.1 | UCAAGGAAA | | | CAAUCCAGGUC | | |
| AD- | GAGCUAGUUAAG | 1301 | 1244- | UUGATUTGCCUU | 1624 | 1242- |
| 1784285.1 | GCAAAUCAA | | 1264 | AACUAGCUCAA | | 1264 |
| AD- | ACUGAAGAACAG | 1302 | 822-842 | UUGATUTGCCUG | 1625 | 820-842 |
| 1784286.1 | GCAAAUCAA | | | UUCUUCAGUGG | | |
| AD- | UGAAGAACAGGC | 1303 | 824-844 | UUUUGATUUGCC | 1626 | 822-844 |
| 1784287.1 | AAAUCAAAA | | | UGUUCUUCAGU | | |
| AD- | CUCCUCUUCUGG | 1304 | 674-694 | UCACACAUUCCA | 1627 | 672-694 |
| 1784288.1 | AAUGUGUGA | | | GAAGAGGAGGG | | |
| AD- | CUCCUCUUCUGG | 1304 | 674-694 | UCACACAUUCCA | 1627 | 672-694 |
| 1784289.1 | AAUGUGUGA | | | GAAGAGGAGGG | | |
| AD- | GCUUUCAACGUG | 1305 | 268-288 | UUCAAACUCCAC | 1628 | 266-288 |
| 1784290.1 | GAGUUUGAA | | | GUUGAAAGCAU | | |
| AD. | UGCUUUCAACGU | 1306 | 267-287 | UCAAACUCCACG | 1629 | 265-287 |
| 1784291.1 | GGAGUUUGA | | | UUGAAAGCAUG | | |
| AD- | UGCUUUCAACGU | 1306 | 267-287 | UCAAACTCCACG | 1630 | 265-287 |
| 1784292.1 | GGAGUUUGA | | | UUGAAAGCAUG | | |
| AD- | CAGGUAAAAUAG | 1307 | 1262- | UAAUCATGACUA | 1631 | 1260- |
| 1784293.1 | UCAUGAUUA | | 1282 | UUUUACCUGAU | | 1282 |
| AD- | CUGUAUCCAAAU | 1308 | 873-893 | UGAUTCAUUAUU | 1632 | 871-893 |
| 1784294.1 | AAUGAAUCA | | | UGGAUACAGAC | | |
| AD- | AAGGCAAAUCAG | 1309 | 1253- | UUAUTUTACCUG | 1633 | 1251- |
| 1784295.1 | GUAAAAUAA | | 1273 | AUUUGCCUUAA | | 1273 |
| AD- | CCUCCUUCCUGA | 1310 | 621-641 | UCCAAGGAUUCA | 1634 | 619-641 |
| 1784296.1 | AUCCUUGGA | | | GGAAGGAGGCC | | |
| AD- | UUCCUUCAAAUA | 1311 | 846-866 | UGACCATCUUAU | 1635 | 844-866 |
| 1784297.1 | AGAUGGUCA | | | UUGAAGGAAGC | | |
| AD- | UUGAAAUUCCGU | 1312 | 742-762 | UUUAAGTUUACG | 1636 | 740-762 |
| 1784298.1 | AAACUUAAA | | | GAAUUUCAACA | | |
| AD- | ACACUCAUACAG | 1313 | 176-196 | UAUACUTGGCUG | 1637 | 174-196 |
| 1784299.1 | CCAAGUAUA | | | UAUGAGUGUCG | | |
| AD- | GCACAGAUCUAC | 1314 | 916-936 | UUCACCAAGGUA | 1638 | 914-936 |
| 1784300.1 | CUUGGUGAA | | | GAUCUGUGCUU | | |
| AD- | CUUUCAACGUGG | 1315 | 269-289 | UAUCAAACUCCA | 1639 | 267-289 |
| 1784301.1 | AGUUUGAUA | | | CGUUGAAAGCA | | |
| AD- | UAGCUAAGCACA | 1316 | 909-929 | UGGUAGAUCUGU | 1640 | 907-929 |
| 1784302.1 | GAUCUACCA | | | GCUUAGCUAAA | | |
| AD- | UUGUGAUACAGA | 1317 | 1469- | UAAAUAUACUCU | 1641 | 1467- |
| 1784303.1 | GUAUAUUUA | | 1489 | GUAUCACAACU | | 1489 |
| AD- | ACUCAUACAGCC | 1318 | 178-198 | UUCAUACUUGGC | 1642 | 176-198 |
| 1784304.1 | AAGUAUGAA | | | UGUAUGAGUGU | | |
| AD- | AGUUAAGGCAAA | 1319 | 1249- | UUUACCTGAUUU | 1643 | 1247- |
| 1784305.1 | UCAGGUAAA | | 1269 | GCCUUAACUAG | | 1269 |
| AD- | GUUGUGAUACAG | 1320 | 1468- | UAAUAUACUCUG | 1644 | 1466- |
| 1784306.1 | AGUAUAUUA | | 1488 | UAUCACAACUC | | 1488 |
| AD- | GUUGUGAUACAG | 1320 | 1468- | UAAUAUACUCUG | 1644 | 1466- |
| 1784307.1 | AGUAUAUUA | | 1488 | UAUCACAACUC | | 1488 |
| AD- | UGACAUCGACAC | 1321 | 168-188 | UCUGUAUGAGUG | 1645 | 166-188 |
| 1784308.1 | UCAUACAGA | | | UCGAUGUCAAC | | |
| AD- | AGAUAAAUUGAG | 1322 | 1235- | UUUAACTAGCUC | 1646 | 1233- |
| 1784309.1 | CUAGUUAAA | | 1255 | AAUUUAUCUUG | | 1255 |
| AD- | UAGGUAUUUUUU | 1323 | 503-523 | UAACCUUCAAAA | 1647 | 501-523 |
| 1784310.1 | UGAAGGUUA | | | AAAUACCUAGA | | |
| AD- | UAGGUAUUUUUU | 1324 | 503-523 | UAACCUTCAAAA | 1648 | 501-523 |
| 1784311.1 | UGAAGGUUA | | | AAAUACCUAGA | | |
| AD- | UGGUGCUUUGUU | 1325 | 1057- | UCUACCAUAAAC | 1649 | 1055- |
| 1784312.1 | UAUGGUAGA | | 1077 | AAAGCACCAAC | | 1077 |
| AD- | UGUGAUACAGAG | 1326 | 1470- | UGAAAUAUACUC | 1650 | 1468- |
| 1784313.1 | UAUAUUUCA | | 1490 | UGUAUCACAAC | | 1490 |
| AD- | UCUUCUGGAAUG | 1327 | 678-698 | UAGGTCACACAU | 1651 | 676-698 |
| 1784314.1 | UGUGACCUA | | | UCCAGAAGAGG | | |
| AD- | CUGGCCGUUCUA | 1328 | 493-513 | UAAAAUACCUAG | 1652 | 491-513 |
| 1784315.1 | GGUAUUUUA | | | AACGGCCAGUC | | |
| AD- | AUCAGGUAAAAU | 1329 | 1260- | UUCATGACUAUU | 1653 | 1258- |
| 1784316.1 | AGUCAUGAA | | 1280 | UUACCUGAUUU | | 1280 |
| AD- | UUCCAUUAAAAC | 1330 | 567-587 | UUGCCCTUUGUU | 1654 | 565-587 |
| 1784317.1 | AAAGGGCAA | | | UUAAUGGAAUC | | |
| AD- | CAAGAGUGCUGA | 1331 | 585-605 | UUAGTGAAGUCA | 1655 | 583-605 |
| 1784318.1 | CUUCACUAA | | | GCACUCUUGCC | | |
| AD- | UUUCAACGUGGA | 1332 | 270-290 | UCAUCAAACUCC | 1656 | 268-290 |
| 1784319.1 | GUUUGAUGA | | | ACGUUGAAAGC | | |
| AD- | UUGGUGCUUUGU | 1333 | 1056- | UUACCAUAAACA | 1657 | 1054- |
| 1784320.1 | UUAUGGUAA | | 1076 | AAGCACCAACC | | 1076 |
| AD- | UUGGUGCUUUGU | 1333 | 1056- | UUACCATAAACA | 1658 | 1054- |
| 1784321.1 | UUAUGGUAA | | 1076 | AAGCACCAACC | | 1076 |
| AD- | CACUCAUACAGC | 1334 | 177-197 | UCAUACUUGGCU | 1659 | 175-197 |
| 1784322.1 | CAAGUAUGA | | | GUAUGAGUGUC | | |
| AD- | AUAAAGUACCUU | 1335 | 1117- | UACAAAGUCAAG | 1660 | 1115- |
| 1784323.1 | GACUUUGUA | | 1137 | GUACUUUAUUC | | 1137 |
| AD- | AUGACUUUUGAA | 1336 | 1407- | UCUCTGTAAUUC | 1661 | 1405- |
| 1784324.1 | UUACAGAGA | | 1427 | AAAAGUCAUUA | | 1427 |
| AD- | GUCAUGAUUCUA | 1337 | 1273- | UACAUUACAUAG | 1662 | 1271- |
| 1784325.1 | UGUAAUGUA | | 1293 | AAUCAUGACUA | | 1293 |
| AD- | GACCUGGAUUGU | 1338 | 693-713 | UCCUTGAGCACA | 1663 | 691-713 |
| 1784326.1 | GCUCAAGGA | | | AUCCAGGUCAC | | |
| AD- | GACAUCGACACU | 1339 | 169-189 | UGCUGUAUGAGU | 1664 | 167-189 |
| 1784327.1 | CAUACAGCA | | | GUCGAUGUCAA | | |
| AD- | GAAGAACAGGCA | 1340 | 825-845 | UCUUTGAUUUGC | 1665 | 823-845 |
| 1784328.1 | AAUCAAAGA | | | CUGUUCUUCAG | | |
| AD- | CGUAAACUUAAC | 1341 | 751-771 | UCCAUUGAAGUU | | 749-771 |
| 1784329.1 | UUCAAUGGA | | | AAGUUUACGGA | | |
| AD- | AGGUAAAAUAGU | 1342 | 1263- | UGAATCAUGACU | 1666 | 1261- |
| 1784330.1 | CAUGAUUCA | | 1283 | AUUUUACCUGA | | 1283 |
| AD- | GUACCUUGACUU | 1343 | 1122- | UUGUGAACAAAG | 1667 | 1120- |
| 1784331.1 | UGUUCACAA | | 1142 | UCAAGGUACUU | | 1142 |
| AD- | CCGUUCUAGGUA | 1344 | 497-517 | UCAAAAAAAUAC | 1668 | 495-517 |
| 1784332.1 | UUUUUUUGA | | | CUAGAACGGCC | | |
| AD- | UUUAUGGUAGUA | 1345 | 1067- | UAGAAAAACUAC | 1669 | 1065- |
| 1784333.1 | GUUUUUCUA | | 1087 | UACCAUAAACA | | 1087 |
| AD- | CGUGGAGUUUGA | 1346 | 276-296 | UGAGAGTCAUCA | 1670 | 274-296 |
| 1784334.1 | UGACUCUCA | | | AACUCCACGUU | | |
| AD- | UUCAACGUGGAG | 1347 | 271-291 | UUCATCAAACUC | 1671 | 269-291 |
| 1784335.1 | UUUGAUGAA | | | CACGUUGAAAG | | |
| AD- | GAGUUGUGAUAC | 1348 | 1466- | UUAUACTCUGUA | 1672 | 1464- |
| 1784336.1 | AGAGUAUAA | | 1486 | UCACAACUCUA | | 1486 |
| AD- | UACCUUGACUUU | 1349 | 1123- | UCUGUGAACAAA | 1673 | 1121- |
| 1784337.1 | GUUCACAGA | | 1143 | GUCAAGGUACU | | 1143 |
| AD- | UACCUUGACUUU | 1349 | 1123- | UCUGTGAACAAA | 1674 | 1121- |
| 1784338.1 | GUUCACAGA | | 1143 | GUCAAGGUACU | | 1143 |
| AD- | UAGAGUUGUGAU | 1350 | 1464- | UUACTCTGUAUC | 1675 | 1462- |
| 1784339.1 | ACAGAGUAA | | 1484 | ACAACUCUAAU | | 1484 |
| AD- | UGAGUGCAAAUC | 1351 | 1214- | UGUGCUAUGGAU | 1676 | 1212- |
| 1784340.1 | CAUAGCACA | | 1234 | UUGCACUCAAC | | 1234 |
| AD- | CAAAUCAGGUAA | 1352 | 1257- | UUGACUAUUUUA | 1677 | 1255- |
| 1784341.1 | AAUAGUCAA | | 1277 | CCUGAUUUGCC | | 1277 |
| AD- | AAGCACAGAUCU | 1353 | 914-934 | UACCAAGGUAGA | 1678 | 912-934 |
| 1784342.1 | ACCUUGGUA | | | UCUGUGCUUAG | | |
| AD- | ACUUUGUUCACA | 1354 | 1130- | UCUACAUGCUGU | 1679 | 1128- |
| 1784343.1 | GCAUGUAGA | | 1150 | GAACAAAGUCA | | 1150 |
| AD- | UGGCCGUUCUAG | 1355 | 494-514 | UAAAAAUACCUA | 1680 | 492-514 |
| 1784344.1 | GUAUUUUUA | | | GAACGGCCAGU | | |
| AD- | GCCAAGUAUGAC | 1356 | 187-207 | UAGGGAAGGGUC | 1681 | 185-207 |
| 1784345.1 | CCUUCCCUA | | | AUACUUGGCUG | | |
| AD- | UAUGGUAGUAGU | 1357 | 1069- | UACAGAAAAACU | 1682 | 1067- |
| 1784346.1 | UUUUCUGUA | | 1089 | ACUACCAUAAA | | 1089 |
| AD- | AAUUGAGCUAGU | 1358 | 1240- | UUUGCCTUAACU | 1683 | 1238- |
| 1784347.1 | UAAGGCAAA | | 1260 | AGCUCAAUUUA | | 1260 |
| AD- | ACUAAAAUGCUG | 1359 | 1174- | UUUUAAAAGCAG | 1684 | 1172- |
| 1784348.1 | CUUUUAAAA | | 1194 | CAUUUUAGUCA | | 1194 |
| AD- | ACUUCACUUGGU | 1360 | 426-446 | UUCCAGTGAACC | 1685 | 424-446 |
| 1784349.1 | UCACUGGAA | | | AAGUGAAGUUC | | |
| AD- | UCUAGGUAUUUU | 1361 | 501-521 | UCCUUCAAAAAA | 1686 | 499-521 |
| 1784350.1 | UUUGAAGGA | | | AUACCUAGAAC | | |
| AD- | AGCACAGAUCUA | 1362 | 915-935 | UCACCAAGGUAG | 1687 | 913-935 |
| 1784351.1 | CCUUGGUGA | | | AUCUGUGCUUA | | |
| AD- | GCCGUUCUAGGU | 1363 | 496-516 | UAAAAAAAUACC | 1688 | 494-516 |
| 1784352.1 | AUUUUUUUA | | | UAGAACGGCCA | | |
| AD- | CUAAAAUGCUGC | 1364 | 1175- | UUUUUAAAAGCA | 1689 | 1173- |
| 1784353.1 | UUUUAAAAA | | 1195 | GCAUUUUAGUC | | 1195 |
| AD- | GAACAGGCAAAU | 1365 | 828-848 | UAAGCUTUGAUU | 1690 | 826-848 |
| 1784354.1 | CAAAGCUUA | | | UGCCUGUUCUU | | |
| AD- | UGCUUUGUUUAU | 1366 | 1060- | UCUACUACCAUA | 1691 | 1058- |
| 1784355.1 | GGUAGUAGA | | 1080 | AACAAAGCACC | | 1080 |
| AD- | AAUUAGAGUUGU | 1367 | 1461- | UUCUGUAUCACA | 1692 | 1459- |
| 1784356.1 | GAUACAGAA | | 1481 | ACUCUAAUUAU | | 1481 |
| AD- | CUGGUUGGUGCU | 1368 | 1052- | UAUAAACAAAGC | 1693 | 1050- |
| 1784357.1 | UUGUUUAUA | | 1072 | ACCAACCAGCC | | 1072 |
| AD- | UCCUUCAAAUAA | 1369 | 847-867 | UGGACCAUCUUA | 1694 | 845-867 |
| 1784358.1 | GAUGGUCCA | | | UUUGAAGGAAG | | |
| AD- | GCCUCCUUCCUG | 1370 | 620-640 | UCAAGGAUUCAG | 1695 | 618-640 |
| 1784359.1 | AAUCCUUGA | | | GAAGGAGGCCA | | |
| AD- | GAUUCUAUGUAA | 137 | 1278- | UGGUTUACAUUA | 1696 | 1276- |
| 1784360.1 | UGUAAACCA | | 1298 | CAUAGAAUCAU | | 1298 |
| AD- | UGGUUGGUGCUU | 1372 | 1053- | UCAUAAACAAAG | 1697 | 1051- |
| 1784361.1 | UGUUUAUGA | | 1073 | CACCAACCAGC | | 1073 |
| AD- | CUCAUACAGCCA | 1373 | 179-199 | UGUCAUACUUGG | 1698 | 177-199 |
| 1784362.1 | AGUAUGACA | | | CUGUAUGAGUG | | |
| AD- | CUCAUACAGCCA | 1373 | 179-199 | UGUCAUACUUGG | 1698 | 177-199 |
| 1784363.1 | AGUAUGACA | | | CUGUAUGAGUG | | |
| AD- | AUCGACACUCAU | 1374 | 172-192 | UUUGGCTGUAUG | 1699 | 170-192 |
| 1784364.1 | ACAGCCAAA | | | AGUGUCGAUGU | | |
| AD- | GCACUGGCAUAA | 1375 | 117-137 | UGGAAGTCCUUA | 1700 | 115-137 |
| 1784365.1 | GGACUUCCA | | | UGCCAGUGCUC | | |
| AD- | AACGUGGAGUUU | 1376 | 274-294 | UGAGTCAUCAAA | 1701 | 272-294 |
| 1784366.1 | GAUGACUCA | | | CUCCACGUUGA | | |
| AD- | GCAAAUCAGGUA | 1377 | 1256- | UGACUAUUUUAC | 1702 | 1254- |
| 1784367.1 | AAAUAGUCA | | 1276 | CUGAUUUGCCU | | 1276 |
| AD- | GCAAAUCAGGUA | 1377 | 1256- | UGACTATUUUAC | 1703 | 1254- |
| 1784368.1 | AAAUAGUCA | | 1276 | CUGAUUUGCCU | | 1276 |
| AD- | CUUCAGAAAGUU | 1378 | 541-561 | UACAUCAACAAC | 1704 | 539-561 |
| 1784369.1 | GUUGAUGUA | | | UUUCUGAAGGC | | |
| AD- | CUUCAGAAAGUU | 1378 | 541-561 | UACATCAACAAC | 1705 | 539-561 |
| 1784370.1 | GUUGAUGUA | | | UUUCUGAAGGC | | |
| AD- | AAAUCAGGUAAA | 1379 | 1258- | UAUGACTAUUUU | 1706 | 1256- |
| 1784371.1 | AUAGUCAUA | | 1278 | ACCUGAUUUGC | | 1278 |
| AD- | AGGCAAAUCAGG | 1380 | 1254- | UCUAUUUUACCU | 1707 | 1252- |
| 1784372.1 | UAAAAUAGA | | 1274 | GAUUUGCCUUA | | 1274 |
| AD- | GGGCAAGAGUGC | 1381 | 582-602 | UUGAAGTCAGCA | 1708 | 580-602 |
| 1784373.1 | UGACUUCAA | | | CUCUUGCCCUU | | |
| AD- | GGCCGUUCUAGG | 1382 | 495-515 | UAAAAAAUACCU | 1709 | 493-515 |
| 1784375.1 | UAUUUUUUA | | | AGAACGGCCAG | | |
| AD- | CGGGCCUUCAGA | 1383 | 536-556 | UAACAACUUUCU | 1710 | 534-556 |
| 1784377.1 | AAGUUGUUA | | | GAAGGCCCGGU | | |
| AD- | GGCAAAUCAGGU | 1384 | 1255- | UACUAUUUUACC | 1711 | 1253- |
| 1784378.1 | AAAAUAGUA | | 1275 | UGAUUUGCCUU | | 1275 |
| AD- | GAGGAUCCUCAA | 1385 | 246-266 | UGACCAUUGUUG | 1712 | 244-266 |
| 1784379.1 | CAAUGGUCA | | | AGGAUCCUCAG | | |
| AD- | GAGGAUCCUCAA | 1385 | 246-266 | UGACCATUGUUG | 1713 | 244-266 |
| 1784380.1 | CAAUGGUCA | | | AGGAUCCUCAG | | |
| AD- | UUCACUUGGUUC | 1386 | 428-448 | UGUUCCAGUGAA | 1714 | 426-448 |
| 1784381.1 | ACUGGAACA | | | CCAAGUGAAGU | | |
| AD- | AGAACUGAUGGU | 1387 | 786-806 | UAGUTGTCCACC | 1715 | 784-806 |
| 1784382.1 | GGACAACUA | | | AUCAGUUCUUC | | |
| AD- | AAUAAAGUACCU | 1388 | 1116- | UCAAAGUCAAGG | 1716 | 1114- |
| 1784383.1 | UGACUUUGA | | 1136 | UACUUUAUUCU | | 1136 |
| AD- | AAUAAAGUACCU | 1388 | 1116- | UCAAAGTCAAGG | 1717 | 1114- |
| 1784384.1 | UGACUUUGA | | 1136 | UACUUUAUUCU | | 1136 |
| AD- | CUUUGUUCACAG | 1389 | 1131- | UCCUACAUGCUG | 1718 | 1129- |
| 1784385.1 | CAUGUAGGA | | 1151 | UGAACAAAGUC | | 1151 |
| AD- | CUUUGUUCACAG | 1389 | 1131- | UCCUACAUGCUG | 1718 | 1129- |
| 1784386.1 | CAUGUAGGA | | 1151 | UGAACAAAGUC | | 1151 |
| AD- | AAUAAGAAUAAA | 1390 | 1110- | UCAAGGTACUUU | 1719 | 1108- |
| 1784387.1 | GUACCUUGA | | 1130 | AUUCUUAUUUC | | 1130 |
| AD- | AGUAGUUUUUCU | 1391 | 1075- | UUGUGUTACAGA | 1720 | 1073- |
| 1784388.1 | GUAACACAA | | 1095 | AAAACUACUAC | | 1095 |
| AD- | CCAAGUAUGACC | 1392 | 188-208 | UCAGGGAAGGGU | 1721 | 186-208 |
| 1784389.1 | CUUCCCUGA | | | CAUACUUGGCU | | |
| AD- | UUGAGUGCAAAU | 1393 | 1213- | UUGCTATGGAUU | 1722 | 1211- |
| 1784390.1 | CCAUAGCAA | | 1233 | UGCACUCAACC | | 1233 |
| AD- | GGCCUUCAGAAA | 1394 | 538-558 | UUCAACAACUUU | 1723 | 536-558 |
| 1784391.1 | GUUGUUGAA | | | CUGAAGGCCCG | | |
| AD- | AGGAUCCUCAAC | 1395 | 247-267 | UUGACCAUUGUU | 1724 | 245-267 |
| 1784392.1 | AAUGGUCAA | | | GAGGAUCCUCA | | |
| AD- | AUUAGAGUUGUG | 1396 | 1462- | UCUCTGTAUCAC | 1725 | 1460- |
| 1784393.1 | AUACAGAGA | | 1482 | AACUCUAAUUA | | 1482 |
| AD- | CAACGUGGAGUU | 1397 | 273-293 | UAGUCATCAAAC | 1726 | 271-293 |
| 1784394.1 | UGAUGACUA | | | UCCACGUUGAA | | |
| AD- | GACUUUUGAAUU | 1398 | 1409- | UAUCTCTGUAAU | 1727 | 1407- |
| 1784395.1 | ACAGAGAUA | | 1429 | UCAAAAGUCAU | | 1429 |
| AD- | UGAGGAUCCUCA | 1399 | 245-265 | UACCAUUGUUGA | 1728 | 243-265 |
| 1784396.1 | ACAAUGGUA | | | GGAUCCUCAGG | | |
| AD- | GAGUUUGAUGAC | 1400 | 280-300 | UUCCTGAGAGUC | 1729 | 278-300 |
| 1784397.1 | UCUCAGGAA | | | AUCAAACUCCA | | |
| AD- | UUUUAAAACAUA | 1401 | 1187- | UUACTUTCCUAU | 1730 | 1185- |
| 1784398.1 | GGAAAGUAA | | 1207 | GUUUUAAAAGC | | 1207 |
| AD- | UUAUGGUAGUAG | 1402 | 1068- | UCAGAAAAACUA | 1731 | 1066- |
| 1784399.1 | UUUUUCUGA | | 1088 | CUACCAUAAAC | | 1088 |
| AD- | AACUUCACUUGG | 1403 | 425-445 | UCCAGUGAACCA | 1732 | 423-445 |
| 1784400.1 | UUCACUGGA | | | AGUGAAGUUCU | | |
| AD | AAAUUGAGCUAG | 1404 | 1239- | UUGCCUTAACUA | 1733 | 1237- |
| 1784401.1 | UUAAGGCAA | | 1259 | GCUCAAUUUAU | | 1259 |
| AD- | UUUGUUUAUGGU | 1405 | 1063- | UAAACUACUACC | 1734 | 1061- |
| 1784402.1 | AGUAGUUUA | | 1083 | AUAAACAAAGC | | 1083 |
| AD- | UUUGUUUAUGGU | 1405 | 1063- | UAAACUACUACC | 1734 | 1061- |
| 1784403.1 | AGUAGUUUA | | 1083 | AUAAACAAAGC | | 1083 |
| AD- | AAGGGCAAGAGU | 1406 | 580-600 | UAAGTCAGCACU | 1735 | 578-600 |
| 1784404.1 | GCUGACUUA | | | CUUGCCCUUUG | | |
| AD- | GGAGUUUGAUGA | 1407 | 279-299 | UCCUGAGAGUCA | 1736 | 277-299 |
| 1784405.1 | CUCUCAGGA | | | UCAAACUCCAC | | |
| AD- | GGGCCUUCAGAA | 1408 | 537-557 | UCAACAACUUUC | 1737 | 535-557 |
| 1784406.1 | AGUUGUUGA | | | UGAAGGCCCGG | | |
| AD- | GCAAGAGUGCUG | 1409 | 584-604 | UAGUGAAGUCAG | 1738 | 582-604 |
| 1784407.1 | ACUUCACUA | | | CACUCUUGCCC | | |
| AD- | AGCCACUGAAGA | 1410 | 818-838 | UUUGCCTGUUCU | 1739 | 816-838 |
| 1784408.1 | ACAGGCAAA | | | UCAGUGGCUGA | | |
| AD- | AUUCCAUUAAAA | 1411 | 566-586 | UGCCCUUUGUUU | 1740 | 564-586 |
| 1784409.1 | CAAAGGGCA | | | UAAUGGAAUCC | | |
| AD- | AUUCCAUUAAAA | 1411 | 566-586 | UGCCCUTUGUUU | 1741 | 564-586 |
| 1784410.1 | CAAAGGGCA | | | UAAUGGAAUCC | | |
| AD- | GUAGUUUUUCUG | 1412 | 1076- | UCUGTGTUACAG | 1742 | 1074- |
| 1784411.1 | UAACACAGA | | 1096 | AAAAACUACUA | | 1096 |
| AD- | GGUAUUUUUUUG | 1413 | 505-525 | UCCAACCUUCAA | 1743 | 503-525 |
| 1784412.1 | AAGGUUGGA | | | AAAAAUACCUA | | |
| AD- | UCCAAAUAAUGA | 1414 | 878-898 | UCCGAAGAUUCA | 1744 | 876-898 |
| 1784413.1 | AUCUUCGGA | | | UUAUUUGGAUA | | |
| AD- | AAACAUAGGAAA | 1415 | 1192- | UCAUTCTACUUU | 1745 | 1190- |
| 1784414.1 | GUAGAAUGA | | 1212 | CCUAUGUUUUA | | 1212 |
| AD- | AUGACUCUCAGG | 1416 | 287-307 | UUGCTUTGUCCU | 1746 | 285-307 |
| 1784415.1 | ACAAAGCAA | | | GAGAGUCAUCA | | |
| AD- | AGCUAGUUAAGG | 1417 | 1245- | UCUGAUUUGCCU | 1747 | 1243- |
| 1784416.1 | CAAAUCAGA | | 1265 | UAACUAGCUCA | | 1265 |
| AD- | CCUGAGGAUCCU | 1418 | 243-263 | UCAUTGTUGAGG | 1748 | 241-263 |
| 1784417.1 | CAACAAUGA | | | AUCCUCAGGGA | | |
| AD- | GGUUGGUGCUUU | 1419 | 1054- | UCCAUAAACAAA | 1749 | 1052- |
| 1784418.1 | GUUUAUGGA | | 1074 | GCACCAACCAG | | 1074 |
| AD- | AGGUAUUUUUUU | 1420 | 504-524 | UCAACCUUCAAA | 1750 | 502-524 |
| 1784419.1 | GAAGGUUGA | | | AAAAUACCUAG | | |
| AD- | UGAAUCUUCGGG | 1421 | 887-907 | UGGGAAACACCC | 1751 | 885-907 |
| 1784420.1 | UGUUUCCCA | | | GAAGAUUCAUU | | |
| AD- | UGAAUCUUCGGG | 1421 | 887-907 | UGGGAAACACCC | 1751 | 885-907 |
| 1784421.1 | UGUUUCCCA | | | GAAGAUUCAUU | | |
| AD- | UAGUAGUUUUUC | 1422 | 1074- | UGUGUUACAGAA | 1752 | 1072- |
| 1784422.1 | UGUAACACA | | 1094 | AAACUACUACC | | 1094 |
| AD- | UAGUAGUUUUUC | 1422 | 1074- | UGUGTUACAGAA | 1753 | 1072- |
| 1784423.1 | UGUAACACA | | 1094 | AAACUACUACC | | 1094 |
| AD- | GUUUGAUGACUC | 1423 | 282-302 | UUGUCCTGAGAG | 1754 | 280-302 |
| 1784424.1 | UCAGGACAA | | | UCAUCAAACUC | | |
| AD- | AAUGAAUCUUCG | 1424 | 885-905 | UGAAACACCCGA | 1755 | 883-905 |
| 1784425.1 | GGUGUUUCA | | | AGAUUCAUUAU | | |
| AD- | CAAAUAAUGAAU | 1425 | 880-900 | UACCCGAAGAUU | 1756 | 878-900 |
| 1784426.1 | CUUCGGGUA | | | CAUUAUUUGGA | | |
| AD- | UUUGUUCACAGC | 1426 | 1132- | UCCCUACAUGCU | 1757 | 1130- |
| 1784427.1 | AUGUAGGGA | | 1152 | GUGAACAAAGU | | 1152 |
| AD- | AUUGUGCUCAAG | 1427 | 700-720 | UAUGGGTUCCUU | 1758 | 698-720 |
| 1784428.1 | GAACCCAUA | | | GAGCACAAUCC | | |
| AD- | GUUGGUGCUUUG | 1428 | 1055- | UACCAUAAACAA | 1759 | 1053- |
| 1784429.1 | UUUAUGGUA | | 1075 | AGCACCAACCA | | 1075 |
| AD- | GAAUCUUCGGGU | 1429 | 888-908 | UAGGGAAACACC | 1760 | 886-908 |
| 1784430.1 | GUUUCCCUA | | | CGAAGAUUCAU | | |
| AD. | GGUAGUAGUUUU | 1430 | 1072- | UGUUACAGAAAA | 1761 | 1070- |
| 1784431.1 | UCUGUAACA | | 1092 | ACUACUACCAU | | 1092 |
| AD- | AGAACAGGCAAA | 1431 | 827-847 | UAGCUUUGAUUU | 1762 | 825-847 |
| 1784432.1 | UCAAAGCUA | | | GCCUGUUCUUC | | |
| AD- | AGAACAGGCAAA | 1431 | 827-847 | UAGCTUTGAUUU | 1763 | 825-847 |
| 1784433.1 | UCAAAGCUA | | | GCCUGUUCUUC | | |
| AD- | AAAAUAGUCAUG | 1432 | 1267- | UCAUAGAAUCAU | 1764 | 1265- |
| 1784434.1 | AUUCUAUGA | | 1287 | GACUAUUUUAC | | 1287 |
| AD- | ACUGGCCGUUCU | 1433 | 492-512 | UAAAUACCUAGA | 1765 | 490-512 |
| 1784435.1 | AGGUAUUUA | | | ACGGCCAGUCC | | |
| AD- | CCCUGAGGAUCC | 1434 | 242-262 | UAUUGUTGAGGA | 1766 | 240-262 |
| 1784436.1 | UCAACAAUA | | | UCCUCAGGGAA | | |
| AD- | GCUGGUUGGUGC | 1435 | 1051- | UUAAACAAAGCA | 1767 | 1049- |
| 1784437.1 | UUUGUUUAA | | 1071 | CCAACCAGCCA | | 1071 |
| AD- | CAGAAAGUUGUU | 1436 | 544-564 | UAGCACAUCAAC | 1768 | 542-564 |
| 1784438.1 | GAUGUGCUA | | | AACUUUCUGAA | | |
| AD- | ACUAACUUCGAU | 1437 | 601-621 | UCCACGAGGAUC | 1769 | 599-621 |
| 1784439.1 | CCUCGUGGA | | | GAAGUUAGUGA | | |
| AD- | CCUUCAGAAAGU | 1438 | 540-560 | UCAUCAACAACU | 1770 | 538-560 |
| 1784440.1 | UGUUGAUGA | | | UUCUGAAGGCC | | |
| AD- | UGAGCACUGGCA | 1439 | 114-134 | UAGUCCTUAUGC | 1771 | 112-134 |
| 1784441.1 | UAAGGACUA | | | CAGUGCUCAGG | | |
| AD- | CUAGUUAAGGCA | 1440 | 1247- | UACCTGAUUUGC | 1772 | 1245- |
| 1784442.1 | AAUCAGGUA | | 1267 | CUUAACUAGCU | | 1267 |
| AD- | CUGAGGAUCCUC | 1441 | 244-264 | UCCAUUGUUGAG | 1773 | 242-264 |
| 1784443.1 | AACAAUGGA | | | GAUCCUCAGGG | | |
| AD- | GUUUAUGGUAGU | 1442 | 1066- | UGAAAAACUACU | 1774 | 1064- |
| 1784444.1 | AGUUUUUCA | | 1086 | ACCAUAAACAA | | 1086 |
| AD- | UGUGACCUGGAU | 1443 | 690-710 | UUGAGCACAAUC | 1775 | 688-710 |
| 1784445.1 | UGUGCUCAA | | | CAGGUCACACA | | |
| AD- | ACAUCGACACUC | 1444 | 170-190 | UGGCTGTAUGAG | 1776 | 168-190 |
| 1784446.1 | AUACAGCCA | | | UGUCGAUGUCA | | |
| AD- | GAUUGUGCUCAA | 1445 | 699-719 | UUGGGUTCCUUG | 1777 | 697-719 |
| 1784447.1 | GGAACCCAA | | | AGCACAAUCCA | | |
| AD- | UCAUACAGCCAA | 1446 | 180-200 | UGGUCATACUUG | 1778 | 178-200 |
| 1784448.1 | GUAUGACCA | | | GCUGUAUGAGU | | |
| AD- | UAAAAUAGUCAU | 1447 | 1266- | UAUAGAAUCAUG | 1779 | 1264- |
| 1784449.1 | GAUUCUAUA | | 1286 | ACUAUUUUACC | | 1286 |
| AD- | UAAAAUAGUCAU | 1447 | 1266- | UAUAGAAUCAUG | 1779 | 1264- |
| 1784450.1 | GAUUCUAUA | | 1286 | ACUAUUUUACC | | 1286 |
| AD- | GUGCUCAAGGAA | 1448 | 703-723 | UCUGAUGGGUUC | 1780 | 701-723 |
| 1784451.1 | CCCAUCAGA | | | CUUGAGCACAA | | |
| AD- | CGAAGAACUGAU | 1449 | 783-803 | UUGUCCACCAUC | 1781 | 781-803 |
| 1784452.1 | GGUGGACAA | | | AGUUCUUCGGG | | |
| AD- | AAUAAAAUGUGA | 1450 | 1001- | UUCUAGTCUUCA | 1782 | 999-1021 |
| 1784453.1 | AGACUAGAA | | 1021 | CAUUUUAUUAG | | |
| AD- | GGCUGGUUGGUG | 1451 | 1050- | UAAACAAAGCAC | 1783 | 1048- |
| 1784454.1 | CUUUGUUUA | | 1070 | CAACCAGCCAC | | 1070 |
| AD- | UUGUUCACAGCA | 1452 | 1133- | UACCCUACAUGC | 1784 | 1131- |
| 1784455.1 | UGUAGGGUA | | 1153 | UGUGAACAAAG | | 1153 |
| AD- | UUCAAAUAAGAU | 1453 | 850-870 | UAUGGGACCAUC | 1785 | 848-870 |
| 1784456.1 | GGUCCCAUA | | | UUAUUUGAAGG | | |
| AD- | UUUAAAACAUAG | 1454 | 1188- | UCUACUUUCCUA | 1786 | 1186- |
| 1784457.1 | GAAAGUAGA | | 1208 | UGUUUUAAAAG | | 1208 |
| AD- | UUGUUUAUGGUA | 1455 | 1064- | UAAAACUACUAC | 1787 | 1062- |
| 1784458.1 | GUAGUUUUA | | 1084 | CAUAAACAAAG | | 1084 |
| AD- | UUGUUUAUGGUA | 1455 | 1064- | UAAAACTACUAC | 1788 | 1062- |
| 1784459.1 | GUAGUUUUA | | 1084 | CAUAAACAAAG | | 1084 |
| AD- | GCUAGUUAAGGC | 1456 | 1246- | UCCUGAUUUGCC | 1789 | 1244- |
| 1784460.1 | AAAUCAGGA | | 1266 | UUAACUAGCUC | | 1266 |
| AD- | GUAAAAUAGUCA | 1457 | 1265- | UUAGAAUCAUGA | 1790 | 1263- |
| 1784461.1 | UGAUUCUAA | | 1285 | CUAUUUUACCU | | 1285 |
| AD- | GUAAAAUAGUCA | 1457 | 1265- | UUAGAATCAUGA | 1791 | 1263- |
| 1784462.1 | UGAUUCUAA | | 1285 | CUAUUUUACCU | | 1285 |
| AD- | GACUGGCCGUUC | 1458 | 491-511 | UAAUACCUAGAA | 1792 | 489-511 |
| 1784463.1 | UAGGUAUUA | | | CGGCCAGUCCA | | |
| AD- | UCAGCCACUGAA | 1459 | 816-836 | UGCCTGTUCUUC | 1793 | 814-836 |
| 1784464.1 | GAACAGGCA | | | AGUGGCUGAGC | | |
| AD- | UGGAAUGUGUGA | 1460 | 683-703 | UAAUCCAGGUCA | 1794 | 681-703 |
| 1784465.1 | CCUGGAUUA | | | CACAUUCCAGA | | |
| AD. | UCACAGCAUGUA | 1461 | 1137- | UCAUCACCCUAC | 1795 | 1135- |
| 1784466.1 | GGGUGAUGA | | 1157 | AUGCUGUGAAC | | 1157 |
| AD- | UACAGCCAAGUA | 1462 | 183-203 | UAAGGGTCAUAC | 1796 | 181-203 |
| 1784467.1 | UGACCCUUA | | | UUGGCUGUAUG | | |
| AD- | CUGAGCACUGGC | 1463 | 113-133 | UGUCCUUAUGCC | 1797 | 111-133 |
| 1784468.1 | AUAAGGACA | | | AGUGCUCAGGU | | |
| AD- | CUGAGCACUGGC | 1463 | 113-133 | UGUCCUTAUGCC | 1798 | 111-133 |
| 1784469.1 | AUAAGGACA | | | AGUGCUCAGGU | | |
| AD- | GCUCAAGGAACC | 1464 | 705-725 | UCGCTGAUGGGU | 1799 | 703-725 |
| 1784470.1 | CAUCAGCGA | | | UCCUUGAGCAC | | |
| AD- | UUCUGGAAUGUG | 1465 | 680-700 | UCCAGGTCACAC | 1800 | 678-700 |
| 1784471.1 | UGACCUGGA | | | AUUCCAGAAGA | | |
| AD- | UAAAUUGAGCUA | 1466 | 1238- | UGCCUUAACUAG | 1801 | 1236- |
| 1784472.1 | GUUAAGGCA | | 1258 | CUCAAUUUAUC | | 1258 |
| AD- | UAUUUUUUUGAA | 1467 | 507-527 | UUGCCAACCUUC | 1802 | 505-527 |
| 1784473.1 | GGUUGGCAA | | | AAAAAAAUACC | | |
| AD- | UAAUUAGAGUUG | 1468 | 1460- | UCUGUAUCACAA | 1803 | 1458- |
| 1784474.1 | UGAUACAGA | | 1480 | CUCUAAUUAUA | | 1480 |
| AD- | UAAUUAGAGUUG | 1468 | 1460- | UCUGTATCACAA | 1804 | 1458- |
| 1784475.1 | UGAUACAGA | | 1480 | CUCUAAUUAUA | | 1480 |
| AD- | UGACUCUCAGGA | 1469 | 288-308 | UCUGCUUUGUCC | 1805 | 286-308 |
| 1784476.1 | CAAAGCAGA | | | UGAGAGUCAUC | | |
| AD- | UGACUCUCAGGA | 1469 | 288-308 | UCUGCUTUGUCC | 1806 | 286-308 |
| 1784477.1 | CAAAGCAGA | | | UGAGAGUCAUC | | |
| AD- | CAUACAGCCAAG | 1470 | 181-201 | UGGGTCAUACUU | 1807 | 179-201 |
| 1784478.1 | UAUGACCCA | | | GGCUGUAUGAG | | |
| AD- | GUAUUUUUUUGA | 1471 | 506-526 | UGCCAACCUUCA | 1808 | 504-526 |
| 1784479.1 | AGGUUGGCA | | | AAAAAAUACCU | | |
| AD- | CACAGCAUGUAG | 1472 | 1138- | UUCATCACCCUA | 1809 | 1136- |
| 1784480.1 | GGUGAUGAA | | 1158 | CAUGCUGUGAA | | 1158 |
| AD- | UAUAAUUAGAGU | 1473 | 1458- | UGUATCACAACU | 1810 | 1456- |
| 1784481.1 | UGUGAUACA | | 1478 | CUAAUUAUAAC | | 1478 |
| AD- | GAUUUUGGGAAA | 1474 | 460-480 | UUGCACAGCUUU | 1811 | 458-480 |
| 1784482.1 | GCUGUGCAA | | | CCCAAAAUCCC | | |
| AD- | UAAAACAAAGGG | 1475 | 573-593 | UCACTCTUGCCC | 1812 | 571-593 |
| 1784483.1 | CAAGAGUGA | | | UUUGUUUUAAU | | |
| AD- | UCAAGGAACCCA | 1476 | 707-727 | UGACGCUGAUGG | 1813 | 705-727 |
| 1784484.1 | UCAGCGUCA | | | GUUCCUUGAGC | | |
| AD- | UCAAGGAACCCA | 1476 | 707-727 | UGACGCTGAUGG | 1814 | 705-727 |
| 1784485.1 | UCAGCGUCA | | | GUUCCUUGAGC | | |
| AD- | UCAGAAAGUUGU | 1477 | 543-563 | UGCACAUCAACA | 1815 | 541-563 |
| 1784486.1 | UGAUGUGCA | | | ACUUUCUGAAG | | |
| AD- | UCAGAAAGUUGU | 1477 | 543-563 | UGCACATCAACA | 1816 | 541-563 |
| 1784487.1 | UGAUGUGCA | | | ACUUUCUGAAG | | |
| AD- | CCAAAUAAUGAA | 1478 | 879-899 | UCCCGAAGAUUC | 1817 | 877-899 |
| 1784488.1 | UCUUCGGGA | | | AUUAUUUGGAU | | |
| AD- | AGCAUGUAGGGU | 1479 | 1141- | UUGCTCAUCACC | 1818 | 1139- |
| 1784489.1 | GAUGAGCAA | | 1161 | CUACAUGCUGU | | 1161 |
| AD- | GAUAAAUUGAGC | 1480 | 1236- | UCUUAACUAGCU | 1819 | 1234- |
| 1784490.1 | UAGUUAAGA | | 1256 | CAAUUUAUCUU | | 1256 |
| AD- | CUCAGCCACUGA | 1481 | 815-835 | UCCUGUUCUUCA | 1820 | 813-835 |
| 1784491.1 | AGAACAGGA | | | GUGGCUGAGCU | | |
| AD- | CUCAGCCACUGA | 1481 | 815-835 | UCCUGUTCUUCA | 1821 | 813-835 |
| 1784492.1 | AGAACAGGA | | | GUGGCUGAGCU | | |
| AD- | CAGCAUGUAGGG | 1482 | 1140- | UGCUCATCACCC | 1822 | 1138- |
| 1784493.1 | UGAUGAGCA | | 1160 | UACAUGCUGUG | | 1160 |
| AD- | AUAAUGAAUCUU | 1483 | 883-903 | UAACACCCGAAG | 1823 | 881-903 |
| 1784494.1 | CGGGUGUUA | | | AUUCAUUAUUU | | |
| AD- | GGAACCCAUCAG | 1484 | 711-731 | UUGCTGACGCUG | 1824 | 709-731 |
| 1784495.1 | CGUCAGCAA | | | AUGGGUUCCUU | | |
| AD- | UGUUCACAGCAU | 1485 | 1134- | UCACCCUACAUG | 1825 | 1132- |
| 1784496.1 | GUAGGGUGA | | 1154 | CUGUGAACAAA | | 1154 |
| AD- | AAACAAAGGGCA | 1486 | 575-595 | UAGCACTCUUGC | 1826 | 573-595 |
| 1784497.1 | AGAGUGCUA | | | CCUUUGUUUUA | | |
| AD- | UGUGUGACCUGG | 1487 | 688-708 | UAGCACAAUCCA | 1827 | 686-708 |
| 1784498.1 | AUUGUGCUA | | | GGUCACACAUU | | |
| AD- | UGUGUGACCUGG | 1487 | 688-708 | UAGCACAAUCCA | 1827 | 686-708 |
| 1784499.1 | AUUGUGCUA | | | GGUCACACAUU | | |
| AD. | AAUAAUGAAUCU | 1488 | 882-902 | UACACCCGAAGA | 1828 | 880-902 |
| 1784500.1 | UCGGGUGUA | | | UUCAUUAUUUG | | |
| AD- | AUUUUUUUGAAG | 1489 | 508-528 | UCUGCCAACCUU | 1829 | 506-528 |
| 1784501.1 | GUUGGCAGA | | | CAAAAAAAUAC | | |
| AD- | AUUUUUUUGAAG | 1489 | 508-528 | UCUGCCAACCUU | 1829 | 506-528 |
| 1784502.1 | GUUGGCAGA | | | CAAAAAAAUAC | | |
| AD- | UGCUCAAGGAAC | 1490 | 704-724 | UGCUGATGGGUU | 1830 | 702-724 |
| 1784503.1 | CCAUCAGCA | | | CCUUGAGCACA | | |
| AD- | UAAUGAAUCUUC | 1491 | 884-904 | UAAACACCCGAA | 1831 | 882-904 |
| 1784504.1 | GGGUGUUUA | | | GAUUCAUUAUU | | |
| AD- | GUGGCUGGUUGG | 1492 | 1048- | UACAAAGCACCA | 1832 | 1046- |
| 1784505.1 | UGCUUUGUA | | 1068 | ACCAGCCACAG | | 1068 |
| AD- | AAGGAACCCAUC | 1493 | 709-729 | UCUGACGCUGAU | 1833 | 707-729 |
| 1784506.1 | AGCGUCAGA | | | GGGUUCCUUGA | | |
| AD- | UUAAAACAAAGG | 1494 | 572-592 | UACUCUTGCCCU | 1834 | 570-592 |
| 1784507.1 | GCAAGAGUA | | | UUGUUUUAAUG | | |
| AD- | CUGUGGCUGGUU | 1495 | 1046- | UAAAGCACCAAC | 1835 | 1044- |
| 1784508.1 | GGUGCUUUA | | 1066 | CAGCCACAGCA | | 1066 |
| AD- | CAGCUCAGCCAC | 1496 | 812-832 | UGUUCUTCAGUG | 1836 | 810-832 |
| 1784509.1 | UGAAGAACA | | | GCUGAGCUGGG | | |
| AD- | AAAUAAUGAAUC | 1497 | 881-901 | UCACCCGAAGAU | 1837 | 879-901 |
| 1784510.1 | UUCGGGUGA | | | UCAUUAUUUGG | | |
| AD- | GAAUGUGUGACC | 1498 | 685-705 | UACAAUCCAGGU | 1838 | 683-705 |
| 1784511.1 | UGGAUUGUA | | | CACACAUUCCA | | |
| AD- | CAUGUAGGGUGA | 1499 | 1143- | UAGUGCTCAUCA | 1839 | 1141- |
| 1784512.1 | UGAGCACUA | | 1163 | CCCUACAUGCU | | 1163 |
| AD- | GGACUGGCCGUU | 1500 | 490-510 | UAUACCTAGAAC | 1840 | 488-510 |
| 1784513.1 | CUAGGUAUA | | | GGCCAGUCCAU | | |
| AD. | AUAAAUUGAGCU | 1501 | 1237- | UCCUUAACUAGC | 1841 | 1235- |
| 1784514.1 | AGUUAAGGA | | 1257 | UCAAUUUAUCU | | 1257 |
| AD- | GAAAGUUGUUGA | 1502 | 546-566 | UCCAGCACAUCA | 1842 | 544-566 |
| 1784515.1 | UGUGCUGGA | | | ACAACUUUCUG | | |
| AD- | GAAAGUUGUUGA | 1502 | 546-566 | UCCAGCACAUCA | 1842 | 544-566 |
| 1784516.1 | UGUGCUGGA | | | ACAACUUUCUG | | |
| AD- | AACAAAGGGCAA | 1503 | 576-596 | UCAGCACUCUUG | 1843 | 574-596 |
| 1784517.1 | GAGUGCUGA | | | CCCUUUGUUUU | | |
| AD- | CCUGAGCACUGG | 1504 | 112-132 | UUCCTUAUGCCA | 1844 | 110-132 |
| 1784518.1 | CAUAAGGAA | | | GUGCUCAGGUC | | |
| AD- | UGAUGGUGGACA | 1505 | 791-811 | UGCGCCAGUUGU | 1845 | 789-811 |
| 1784519.1 | ACUGGCGCA | | | CCACCAUCAGU | | |
| AD- | ACAAAGGGCAAG | 1506 | 577-597 | UUCAGCACUCUU | 1846 | 575-597 |
| 1784520.1 | AGUGCUGAA | | | GCCCUUUGUUU | | |
| AD- | ACGGACCUGAGC | 1507 | 107-127 | UAUGCCAGUGCU | 1847 | 105-127 |
| 1784521.1 | ACUGGCAUA | | | CAGGUCCGUUG | | |
| AD- | UGGGAAAGCUGU | 1508 | 465-485 | UGUUGCTGCACA | 1848 | 463-485 |
| 1784522.1 | GCAGCAACA | | | GCUUUCCCAAA | | |
| AD- | AACCCAUCAGCG | 1509 | 713-733 | UGCUGCTGACGC | 1849 | 711-733 |
| 1784523.1 | UCAGCAGCA | | | UGAUGGGUUCC | | |
| AD- | AGCUCAGCCACU | 1510 | 813-833 | UUGUTCTUCAGU | 1850 | 811-833 |
| 1784524.1 | GAAGAACAA | | | GGCUGAGCUGG | | |
| AD- | UUUUGAAGGUUG | 1511 | 512-532 | UAGCGCTGCCAA | 1851 | 510-532 |
| 1784525.1 | GCAGCGCUA | | | CCUUCAAAAAA | | |
| AD- | GUAUGACCCUUC | 1512 | 192-212 | UGCUTCAGGGAA | 1852 | 190-212 |
| 1784526.1 | CCUGAAGCA | | | GGGUCAUACUU | | |
| AD- | CUACCCAGGCUC | 1513 | 651-671 | UUGGTCAGUGAG | 1853 | 649-671 |
| 1784527.1 | ACUGACCAA | | | CCUGGGUAGGU | | |
| AD- | ACCCAGGCUCAC | 1514 | 653-673 | UGGUGGTCAGUG | 1854 | 651-673 |
| 1784528.1 | UGACCACCA | | | AGCCUGGGUAG | | |
| AD- | AUGGACUGGCCG | 1515 | 488-508 | UACCUAGAACGG | 1855 | 486-508 |
| 1784529.1 | UUCUAGGUA | | | CCAGUCCAUCA | | |
| AD- | ACCUGAGCACUG | 1516 | 111-131 | UCCUUAUGCCAG | 1856 | 109-131 |
| 1784530.1 | GCAUAAGGA | | | UGCUCAGGUCC | | |
| AD- | CCAUCAGCGUCA | 1517 | 716-736 | UCUCGCUGCUGA | 1857 | 714-736 |
| 1784531.1 | GCAGCGAGA | | | CGCUGAUGGGU | | |
| AD- | UGGACUGGCCGU | 1518 | 489-509 | UUACCUAGAACG | 1858 | 487-509 |
| 1784532.1 | UCUAGGUAA | | | GCCAGUCCAUC | | |
| AD- | UUUUGGGAAAGC | 1519 | 462-482 | UGCUGCACAGCU | 1859 | 460-482 |
| 1784533.1 | UGUGCAGCA | | | UUCCCAAAAUC | | |
| AD- | CUGAUGGACUGG | 1520 | 485-505 | UUAGAACGGCCA | 1860 | 483-505 |
| 1784534.1 | CCGUUCUAA | | | GUCCAUCAGGU | | |
| AD- | ACCUACCCAGGC | 1521 | 649-669 | UGUCAGTGAGCC | 1861 | 647-669 |
| 1784535.1 | UCACUGACA | | | UGGGUAGGUCC | | |
| AD- | GGACCUACCCAG | 1522 | 647-667 | UCAGTGAGCCUG | 1862 | 645-667 |
| 1784536.1 | GCUCACUGA | | | GGUAGGUCCAG | | |
| AD- | GAUGGACUGGCC | 1523 | 487-507 | UCCUAGAACGGC | 1863 | 485-507 |
| 1784537.1 | GUUCUAGGA | | | CAGUCCAUCAG | | |
| AD- | AAGGUUGGCAGC | 1524 | 517-537 | UGGUTUAGOGCU | 1864 | 515-537 |
| 1784538.1 | GCUAAACCA | | | GCCAACCUUCA | | |
| AD- | UGAUGGACUGGC | 1525 | 486-506 | UCUAGAACGGCC | 1865 | 484-506 |
| 1784539.1 | CGUUCUAGA | | | AGUCCAUCAGG | | |
| AD- | AACUGAUGGUGG | 1526 | 788-808 | UCCAGUUGUCCA | 1866 | 786-808 |
| 1784540.1 | ACAACUGGA | | | CCAUCAGUUCU | | |
| AD- | AACUGAUGGUGG | 1526 | 788-808 | UCCAGUTGUCCA | 1867 | 786-808 |
| 1784541.1 | ACAACUGGA | | | CCAUCAGUUCU | | |
| AD- | ACAACUGCUGUG | 1527 | 1039- | UCAACCAGCCAC | 1868 | 1037- |
| 1784542.1 | GCUGGUUGA | | 1059 | AGCAGUUGUGU | | 1059 |
| AD- | ACAACUGCUGUG | 1527 | 1039- | UCAACCAGCCAC | 1868 | 1037- |
| 1784543.1 | GCUGGUUGA | | 1059 | AGCAGUUGUGU | | 1059 |
| AD- | CAACGGACCUGA | 1528 | 105-125 | UGCCAGTGCUCA | 1869 | 103-125 |
| 1784544.1 | GCACUGGCA | | | GGUCCGUUGUG | | |
| AD- | CAACUGCUGUGG | 1529 | 1040- | UCCAACCAGCCA | 1870 | 1038- |
| 1784545.1 | CUGGUUGGA | | 1060 | CAGCAGUUGUG | | 1060 |
| AD- | ACUGAUGGUGGA | 1530 | 789-809 | UGCCAGTUGUCC | 1871 | 787-809 |
| 1784546.1 | CAACUGGCA | | | ACCAUCAGUUC | | |
| AD- | CUGCUGUGGCUG | 1531 | 1043- | UGCACCAACCAG | 1872 | 1041- |
| 1784547.1 | GUUGGUGCA | | 1063 | CCACAGCAGUU | | 1063 |

TABLE 8
Modified Sense and Antisense Strand Sequences of CA2 dsRNA Agents

| | | SEQ | | SEQ | mRNA Target | SEQ |
|---|---|---|---|---|---|---|
| Duplex | Sense Sequence | ID | Antisense Sequence | ID | Sequence | ID |
| Name | 5′ to 3′ | NO: | 5′ to 3′ | NO: | 5′ to 3′ | NO: |
| AD- | usgsuuucCfuAfUf | 1873 | VPusUfsugdCu(Tgn)ga | 2183 | UCUGUUUCCUAU | 2541 |
| 1784188.1 | Gfaucaagcasasa | | ucauAfgGfaaacasgsa | | GAUCAAGCAAC | |
| AD- | usgsacuuCfaCfUf | 1874 | VPusGfsaucGfaaguuag | 2184 | GCUGACUUCACU | 2542 |
| 1784189.1 | Afacuucgauscsa | | UfgAfagucasgsc | | AACUUCGAUCC | |
| AD- | csasaagcUfuCfCf | 1875 | VPusCfsuuaUfuugaagg | 2185 | AUCAAAGCUUCC | 2543 |
| 1784190.1 | Ufucaaauaasgsa | | AfaGfcuuugsasu | | UUCAAAUAAGA | |
| AD- | uscsaaagCfuUfCf | 1876 | VPusUfsuadTu(Tgn)ga | 2186 | AAUCAAAGCUUC | 2544 |
| 1784191.1 | Cfuucaaauasasa | | aggaAfgCfuuugasusu | | CUUCAAAUAAG | |
| AD- | gsuscuguAfuCfCf | 1877 | VPusUfsucaUfuauuugg | 2187 | UAGUCUGUAUCC | 2545 |
| 1784192.1 | Afaauaaugasasa | | AfuAfcagacsusa | | AAAUAAUGAAU | |
| AD | gsuscuguAfuCfCf | 1877 | VPusUfsucdAu(Tgn)au | 2188 | UAGUCUGUAUCC | 2545 |
| 1784193.1 | Afaauaaugasasa | | uuggAfuAfcagacsusa | | AAAUAAUGAAU | |
| AD- | asusuccgUfaAfAf | 1878 | VPusUfsgadAg(Tgn)ua | 2189 | AAAUUCCGUAAA | 2546 |
| 1784194.1 | Cfuuaacuucsasa | | aguuUfaCfggaaususu | | CUUAACUUCAA | |
| AD | uscscuauGfaUfCf | 1879 | VPusGfsaadGu(Tgn)gc | 2190 | UUUCCUAUGAUC | 2547 |
| 1784195.1 | Afagcaacuuscsa | | uugaUfcAfuaggasasa | | AAGCAACUUCC | |
| AD- | gsusuuccUfaUfGf | 1880 | VPusGfsuudGc(Tgn)ug | 2191 | CUGUUUCCUAUG | 2548 |
| 1784196.1 | Afucaagcaascsa | | aucaUfaGfgaaacsasg | | AUCAAGCAACU | |
| AD- | asusgcugCfuUfUf | 1881 | VPusCfsuadTg(Tgn)uu | 2192 | AAAUGCUGCUUU | 2549 |
| 1784197.1 | Ufaaaacauasgsa | | uaaaAfgCfagcaususu | | UAAAACAUAGG | |
| AD- | csasuucaGfaCfAf | 1882 | VPusUfsaudGa(Tgn)au | 2193 | UCCAUUCAGACA | 2550 |
| 1784198.1 | Afuauaucausasa | | auugUfcUfgaaugsgsa | | AUAUAUCAUAA | |
| AD- | gsascuucAfcUfAf | 1883 | VPusGfsgauCfgaaguua | 2194 | CUGACUUCACUA | 2551 |
| 1784199.1 | Afcuucgaucscsa | | GfuGfaagucsasg | | ACUUCGAUCCU | |
| AD- | cscsauucAfgAfCf | 1884 | VPusAfsugaUfauauugu | 2195 | UUCCAUUCAGAC | 2552 |
| 1784200.1 | Afauauaucasusa | | CfuGfaauggsasa | | AAUAUAUCAUA | |
| AD- | uscsuguaUfcCfAf | 1885 | VPusAfsuudCa(Tgn)ua | 2196 | AGUCUGUAUCCA | 2553 |
| 1784201.1 | Afauaaugaasusa | | uuugGfaUfacagascsu | | AAUAAUGAAUC | |
| AD- | asasucaaAfgCfUf | 1886 | VPusAfsuudTg(Agn)ag | 2197 | CAAAUCAAAGCU | 2554 |
| 1784202.1 | Ufccuucaaasusa | | gaagCfuUfugauususg | | UCCUUCAAAUA | |
| AD- | asusucagAfcAfAf | 1887 | VPusUfsuadTg(Agn)ua | 2198 | CCAUUCAGACAA | 2555 |
| 1784203.1 | Ufauaucauasasa | | uauuGfuCfugaausgsg | | UAUAUCAUAAC | |
| AD- | cscsguaaAfcUfUf | 1888 | VPusCfsauuGfaaguuaa | 2199 | UUCCGUAAACUU | 2556 |
| 1784204.1 | Afacuucaausgsa | | GfuUfuacggsasa | | AACUUCAAUGG | |
| AD- | cscsguaaAfcUfUf | 1888 | VPusCfsaudTg(Agn)ag | 2200 | UUCCGUAAACUU | 2556 |
| 1784205.1 | Afacuucaausgsa | | uuaaGfuUfuacggsasa | | AACUUCAAUGG | |
| AD- | gsusgcugAfcUfUf | 1890 | VPusGfsaadGu(Tgn)ag | 2201 | GAGUGCUGACUU | 2557 |
| 1784206.1 | Cfacuaacuuscsa | | ugaaGfuCfagcacsusc | | CACUAACUUCG | |
| AD- | asasgcuuCfcUfUf | 1891 | VPusAfsucuUfauuugaa | 2202 | CAAAGCUUCCUU | 2558 |
| 1784207.1 | Cfaaauaagasusa | | GfgAfagcuususg | | CAAAUAAGAUG | |
| AD- | asasgcuuCfcUfUf | 1891 | VPusAfsucdTu(Agn)uu | 2203 | CAAAGCUUCCUU | 2558 |
| 1784208.1 | Cfaaauaagasusa | | ugaaGfgAfagcuususg | | CAAAUAAGAUG | |
| AD- | asasauucCfgUfAf | 1892 | VPusAfsaguUfaaguuua | 2204 | UGAAAUUCCGUA | 2559 |
| 1784209.1 | Afacuuaacususa | | CfgGfaauuuscsa | | AACUUAACUUC | |
| AD- | csusgucuGfuUfUf | 1893 | VPusUfsgadTc(Agn)ua | 2205 | CCCUGUCUGUUU | 2560 |
| 1784210.1 | Cfcuaugaucsasa | | ggaaAfcAfgacagsgsg | | CCUAUGAUCAA | |
| AD- | gsusauccAfaAfUf | 1894 | VPusAfsagaUfucauuau | 2206 | CUGUAUCCAAAU | 2561 |
| 1784211.1 | Afaugaaucususa | | UfuGfgauacsasg | | AAUGAAUCUUC | |
| AD- | gsusauccAfaAfUf | 1894 | VPusAfsagdAu(Tgn)ca | 2207 | CUGUAUCCAAAU | 2561 |
| 1784212.1 | Afaugaaucususa | | uuauUfuGfgauacsasg | | AAUGAAUCUUC | |
| AD- | csusgacuUfcAfCf | 1895 | VPusAfsucgAfaguuagu | 2208 | UGCUGACUUCAC | 2562 |
| 1784213.1 | Ufaacuucgasusa | | GfaAfgucagscsa | | UAACUUCGAUC | |
| AD- | gscsuuccUfuCfAf | 1896 | VPusCfscauCfuuauuug | 2209 | AAGCUUCCUUCA | 2563 |
| 1784214.1 | Afauaagaugsgsa | | AfaGfgaagcsusu | | AAUAAGAUGGU | |
| AD- | gscsuuccUfuCfAf | 1896 | VPusCfscadTc(Tgn)ua | 2210 | AAGCUUCCUUCA | 2563 |
| 1784215.1 | Afauaagaugsgsa | | uungAfaGfgaagcsusu | | AAUAAGAUGGU | |
| AD- | asasaucaAfaGfCf | 1897 | VPusUfsuudGa(Agn)g | 2211 | GCAAAUCAAAGC | 2564 |
| 1784216.1 | Ufuccuucaasasa | | gaagcUfuUfgauuusgsc | | UUCCUUCAAAU | |
| AD- | asgscuucCfuUfCf | 1898 | VPusCfsaucUfuauuuga | 2212 | AAAGCUUCCUUC | 2565 |
| 1784217.1 | Afaauaagausgsa | | AfgGfaagcususu | | AAAUAAGAUGG | |
| AD- | usgscugcUfuUfUf | 1899 | VPusCfscuaUfguuuuaa | 2213 | AAUGCUGCUUUU | 2566 |
| 1784218.1 | Afaaacauagsgsa | | AfaGfcagcasusu | | AAAACAUAGGA | |
| AD- | asgsgcaaAfuCfAf | 1900 | VPusAfsaggAfagcuuug | 2214 | ACAGGCAAAUCA | 2567 |
| 1784219.1 | Afagcuuccususa | | AfuUfugccusgsu | | AAGCUUCCUUC | |
| AD- | asgsgcaaAfuCfAf | 1900 | VPusAfsagdGa(Agn)gc | 2215 | ACAGGCAAAUCA | 2567 |
| 1784220.1 | Afagcuuccususa | | uuugAfuUfugccusgsu | | AAGCUUCCUUC | |
| AD- | gsgscaaaUfcAfAf | 1901 | VPusGfsaadGg(Agn)ag | 2216 | CAGGCAAAUCAA | 2568 |
| 1784221.1 | Afgcuuccuuscsa | | cuuuGfaUfuugccsusg | | AGCUUCCUUCA | |
| AD- | asasagcuUfcCfUf | 1902 | VPusUfscuuAfuuugaag | 2217 | UCAAAGCUUCCU | 2569 |
| 1784222.1 | Ufcaaaaagsasa | | GfaAfgcuuusgsa | | UCAAAUAAGAU | |
| AD- | asasagcuUfcCfUf | 1902 | VPusUfscudTa(Tgn)uu | 2218 | UCAAAGCUUCCU | 2569 |
| 1784223.1 | Ufcaaauaagsasa | | gaagGfaAfgcuuusgsa | | UCAAAUAAGAU | |
| AD- | usasaaauGfcUfGf | 1903 | VPusGfsuuuUfaaaagca | 2219 | ACUAAAAUGCUG | 2570 |
| 1784224.1 | Cfuuuuaaaascsa | | GfcAfuuuuasgsu | | CUUUUAAAACA | |
| AD- | asasgaauAfaAfGf | 1904 | VPusAfsgudCa(Agn)g | 2220 | AUAAGAAUAAAG | 2571 |
| 1784225.1 | Ufaccuugacsusa | | guacuUfuAfuucuusasu | | UACCUUGACUU | |
| AD- | asgsaauaAfaGfUf | 1905 | VPusAfsaguCfaagguac | 2221 | UAAGAAUAAAGU | 2572 |
| 1784226.1 | Afccuugacususa | | UfuUfauucususa | | ACCUUGACUUU | |
| AD- | asgsaauaAfaGfUf | 1905 | VPusAfsagdTc(Agn)ag | 2222 | UAAGAAUAAAGU | 2572 |
| 1784227.1 | Afccuugacususa | | guacUfuUfauucususa | | ACCUUGACUUU | |
| AD- | gsuscuguUfuCfCf | 1906 | VPusCfsuudGa(Tgn)ca | 2223 | CUGUCUGUUUCC | 2573 |
| 1784228.1 | Ufaugaucaasgsa | | uaggAfaAfcagacsasg | | UAUGAUCAAGC | |
| AD- | uscscguaAfaCfUf | 1907 | VPusAfsuudGa(Agn)g | 2224 | AUUCCGUAAACU | 2574 |
| 1784229.1 | Ufaacuucaasusa | | uuaagUfuUfacggasasu | | UAACUUCAAUG | |
| AD- | cscsucuuCfuGfGf | 1908 | VPusGfsucdAc(Agn)ca | 2225 | CUCCUCUUCUGG | 2575 |
| 1784230.1 | Afaugugugascsa | | uuccAfgAfagaggsasg | | AAUGUGUGACC | |
| AD- | usasuccaAfaUfAf | 1909 | VPusGfsaadGa(Tgn)uc | 2226 | UGUAUCCAAAUA | 2576 |
| 1784231.1 | Afugaaucuuscsa | | auuaUfuUfggauascsa | | AUGAAUCUUCG | |
| AD- | uscsuguuUfcCfUf | 1910 | VPusGfscudTg(Agn)uc | 2227 | UGUCUGUUUCCU | 2577 |
| 1784232.1 | Afugaucaagscsa | | auagGfaAfacagascsa | | AUGAUCAAGCA | |
| AD- | gsusugacAfuCfOf | 1911 | VPusGfsuadTg(Agn)gu | 2228 | CUGUUGACAUCG | 2578 |
| 1784233.1 | Afcacucauascsa | | gucgAfuGfucaacsasg | | ACACUCAUACA | |
| AD- | asasguacCfuUfGf | 1912 | VPusUfsgaaCfaaaguca | 2229 | UAAAGUACCUUG | 2579 |
| 1784234.1 | Afcuuuguucsasa | | AfgGfuacuususa | | ACUUUGUUCAC | |
| AD- | asasguacCfuUfGf | 1912 | VPusUfsgadAc(Agn)aa | 2230 | UAAAGUACCUUG | 2579 |
| 1784235.1 | Afcuuuguucsasa | | gucaAfgGfuacuususa | | ACUUUGUUCAC | |
| AD- | csasgaucUfaCfCf | 1913 | VPusAfsaadTc(Agn)cc | 2231 | CACAGAUCUACC | 2580 |
| 1784236.1 | Ufuggugauususa | | aaggUfaGfaucugsusg | | UUGGUGAUUUG | |
| AD- | csusggauUfgUfGf | 1914 | VPusGfsuudCc(Tgn)ug | 2232 | ACCUGGAUUGUG | 2581 |
| 1784237.1 | Cfucaaggaascsa | | agcaCfaAfuccagsgsu | | CUCAAGGAACC | |
| AD- | usgscuuuUfaAfAf | 1915 | VPusUfsuudCc(Tgn)au | 2233 | GCUGCUUUUAAA | 2582 |
| 1784238.1 | Afcauaggaasasa | | guuuUfaAfaagcasgsc | | ACAUAGGAAAG | |
| AD | usgscugaCfuUfCf | 1916 | VPusCfsgaaGfuuaguga | 2234 | AGUGCUGACUUC | 2583 |
| 1784239.1 | Afcuaacuucsgsa | | AfgUfcagcascsu | | ACUAACUUCGA | |
| AD- | usgscugaCfuUfCf | 1916 | VPusCfsgadAg(Tgn)ua | 2235 | AGUGCUGACUUC | 2583 |
| 1784240.1 | Afcuaacuucsgsa | | gugaAfgUfcagcascsu | | ACUAACUUCGA | |
| AD- | gsasaauuCfcGfUf | 1917 | VPusAfsguuAfaguuuac | 2236 | UUGAAAUUCCGU | 2584 |
| 1784241.1 | Afaacuuaacsusa | | GfgAfauuucsasa | | AAACUUAACUU | |
| AD- | gsasaauuCfcGfUf | 1917 | VPusAfsgudTa(Agn)gu | 2237 | UUGAAAUUCCGU | 2584 |
| 1784242.1 | Afaacuuaacsusa | | uuacGfgAfauuucsasa | | AAACUUAACUU | |
| AD- | usasaggcAfaAfUf | 1918 | VPusAfsuuuUfaccugau | 2238 | GUUAAGGCAAAU | 2585 |
| 1784243.1 | Cfagguaaaasusa | | UfuGfccuuasasc | | CAGGUAAAAUA | |
| AD- | usasaggcAfaAfUf | 1918 | VPusAfsuudTu(Agn)cc | 2239 | GUUAAGGCAAAU | 2585 |
| 1784244.1 | Cfagguaaaasusa | | ugauUfuGfccuuasasc | | CAGGUAAAAUA | |
| AD- | gsusucuaGfgUfAf | 1919 | VPusUfsucaAfaaaaaua | 2240 | CCGUUCUAGGUA | 2586 |
| 1784245.1 | Ufuuuuuugasasa | | CfcUfagaacsgsg | | UUUUUUUGAAG | |
| AD- | asasgauaAfaUfUf | 1920 | VPusUfsaadCu(Agn)gc | 2241 | ACAAGAUAAAUU | 2587 |
| 1784246.1 | Gfagcuaguusasa | | ucaaUfuUfaucuusgsu | | GAGCUAGUUAA | |
| AD- | ususagcuAfaGfCf | 1921 | VPusGfsuadGa(Tgn)cu | 2242 | CUUUAGCUAAGC | 2588 |
| 1784247.1 | Afcagaucuascsa | | gugcUfuAfgcuaasasg | | ACAGAUCUACC | |
| AD- | csusucacUfaAfCf | 1922 | VPusGfsagdGa(Tgn)cg | 2243 | GACUUCACUAAC | 2589 |
| 1784248.1 | Ufucgauccuscsa | | aaguUfaGfugaagsusc | | UUCGAUCCUCG | |
| AD- | asasuuccGfuAfAf | 1923 | VPusGfsaadGu(Tgn)aa | 2244 | GAAAUUCCGUAA | 2590 |
| 1784249.1 | Afcuuaacuuscsa | | guuuAfcGfgaauususc | | ACUUAACUUCA | |
| AD- | csusgcuuUfuAfAf | 1924 | VPusUfsucdCu(Agn)u | 2245 | UGCUGCUUUUAA | 2591 |
| 1784250.1 | Afacauaggasasa | | guuuuAfaAfagcagscsa | | AACAUAGGAAA | |
| AD- | csusguugAfcAfUf | 1925 | VPusAfsugdAg(Tgn)g | 2246 | CCCUGUUGACAU | 2592 |
| 1784251.1 | Cfgacacucasusa | | ucgauGfuCfaacagsgsg | | CGACACUCAUA | |
| AD- | ususcacuAfaCfUf | 1926 | VPusCfsgadGg(Agn)uc | 2247 | ACUUCACUAACU | 2593 |
| 1784252.1 | Ufcgauccucsgsa | | gaagUfuAfgugaasgsu | | UCGAUCCUCGU | |
| AD- | gscsuaagCfaCfAf | 1927 | VPusAfsagdGu(Agn)g | 2248 | UAGCUAAGCACA | 2594 |
| 1784253.1 | Gfaucuaccususa | | aucugUfgCfuuagcsusa | | GAUCUACCUUG | |
| AD- | usasaaguAfcCfUf | 1928 | VPusAfsacaAfagucaag | 2249 | AAUAAAGUACCU | 2595 |
| 1784254.1 | Ufgacuuugususa | | GfuAfcuuuasusu | | UGACUUUGUUC | |
| AD- | asasaaugCfuGfCf | 1929 | VPusUfsgudTu(Tgn)aa | 2250 | CUAAAAUGCUGC | 2596 |
| 1784255.1 | Ufuuuaaaacsasa | | aagcAfgCfauuuusasg | | UUUUAAAACAU | |
| AD- | gscsugcuUfuUfAf | 1930 | VPusUfsccuAfuguuuua | 2251 | AUGCUGCUUUUA | 2597 |
| 1784256.1 | Afaacauaggsasa | | AfaAfgcagcsasu | | AAACAUAGGAA | |
| AD- | gscsugcuUfuUfAf | 1930 | VPusUfsccdTa(Tgn)gu | 2252 | AUGCUGCUUUUA | 2597 |
| 1784257.1 | Afaacauaggsasa | | uuuaAfaAfgcagcsasu | | AAACAUAGGAA | |
| AD- | uscsaugaUfuCfUf | 1931 | VPusUfsacaUfuacauag | 2253 | AGUCAUGAUUCU | 2598 |
| 1784258.1 | Afuguaaugusasa | | AfaUfcaugascsu | | AUGUAAUGUAA | |
| AD- | uscsaugaUfuCfUf | 1931 | VPusUfsacdAu(Tgn)ac | 2254 | AGUCAUGAUUCU | 2598 |
| 1784259.1 | Afuguaaugusasa | | auagAfaUfcaugascsu | | AUGUAAUGUAA | |
| AD- | asgsugcuGfaCfUf | 1932 | VPusAfsaguUfagugaag | 2255 | AGAGUGCUGACU | 2599 |
| 1784260.1 | Ufcacuaacususa | | UfcAfgcacuscsu | | UCACUAACUUC | |
| AD- | csusaagcAfcAfGf | 1933 | VPusCfsaadGg(Tgn)ag | 2256 | AGCUAAGCACAG | 2600 |
| 1784261.1 | Afucuaccuusgsa | | aucuGfuGfcuuagscsu | | AUCUACCUUGG | |
| AD- | csascuaaCfuUfCf | 1934 | VPusCfsacgAfggaucga | 2257 | UUCACUAACUUC | 2601 |
| 1784262.1 | Gfauccucgusgsa | | AfgUfuagugsasa | | GAUCCUCGUGG | |
| AD- | csusgaagAfaCfAf | 1935 | VPusUfsugdAu(Tgn)u | 2258 | CACUGAAGAACA | 2602 |
| 1784263.1 | Gfgcaaaucasasa | | gccugUfuCfuucagsusg | | GGCAAAUCAAA | |
| AD- | asasaguaCfcUfUf | 1936 | VPusGfsaacAfaagucaa | 2259 | AUAAAGUACCUU | 2603 |
| 1784264.1 | Gfacuuuguuscsa | | GfgUfacuuusasu | | GACUUUGUUCA | |
| AD- | gscsuuugUfuUfAf | 1937 | VPusAfscudAc(Tgn)ac | 2260 | GUGCUUUGUUUA | 2604 |
| 1784265.1 | Ufgguaguagsusa | | cauaAfaCfaaagcsasc | | UGGUAGUAGUU | |
| AD- | csasugauUfcUfAf | 1938 | VPusUfsuadCa(Tgn)ua | 2261 | GUCAUGAUUCUA | 2605 |
| 1784266.1 | Ufguaauguasasa | | cauaGfaAfucaugsasc | | UGUAAUGUAAA | |
| AD- | csgsuucuAfgGfUf | 1939 | VPusUfscaaAfaaaauac | 2262 | GCCGUUCUAGGU | 2606 |
| 1784267.1 | Afuuuuuuugsasa | | CfuAfgaacgsgsc | | AUUUUUUUGAA | |
| AD- | ususcuagGfuAfUf | 1940 | VPusCfsuucAfaaaaaau | 2263 | CGUUCUAGGUAU | 2607 |
| 1784268.1 | Ufuuuuugaasgsa | | AfcCfuagaascsg | | UUUUUUGAAGG | |
| AD- | uscscuucCfuGfAf | 194 | VPusAfsuccAfaggauuc | 2264 | CCUCCUUCCUGA | 2608 |
| 1784269.1 | Afuccuuggasusa | | AfgGfaaggasgsg | | AUCCUUGGAUU | |
| AD- | uscscuucCfuGfAf | 194 | VPusAfsucdCa(Agn)gg | 2265 | CCUCCUUCCUGA | 2608 |
| 1784270.1 | Afuccuuggasusa | | auucAfgGfaaggasgsg | | AUCCUUGGAUU | |
| AD- | gsascuaaAfaUfGf | 1942 | VPusUfsuaaAfagcagca | 2266 | UUGACUAAAAUG | 2609 |
| 1784271.1 | Cfugcuuuuasasa | | UfuUfuagucsasa | | CUGCUUUUAAA | |
| AD- | gsascuaaAfaUfGf | 1942 | VPusUfsuadAa(Agn)gc | 2267 | UUGACUAAAAUG | 2609 |
| 1784272.1 | Cfugcuuuuasasa | | agcaUfuUfuagucsasa | | CUGCUUUUAAA | |
| AD- | asascaggCfaAfAf | 1943 | VPusGfsaadGc(Tgn)uu | 2268 | AGAACAGGCAAA | 2610 |
| 1784273.1 | Ufcaaagcuuscsa | | gauuUfgCfcuguuscsu | | UCAAAGCUUCC | |
| AD- | cscsuuccUfgAfAf | 1944 | VPusAfsaucCfaaggauu | 2269 | CUCCUUCCUGAA | 2611 |
| 1784274.1 | Ufccuuggaususa | | CfaGfgaaggsasg | | UCCUUGGAUUA | |
| AD- | usgsaugaCfuCfUf | 1945 | VPusCfsuudTg(Tgn)cc | 2270 | UUUGAUGACUCU | 2612 |
| 1784275.1 | Cfaggacaaasgsa | | ugagAfgUfcaucasasa | | CAGGACAAAGC | |
| AD- | usgsgaguUfuGfAf | 1946 | VPusCfsugdAg(Agn)g | 2271 | CGUGGAGUUUGA | 2613 |
| 1784276.1 | Ufgacucucasgsa | | ucaucAfaAfcuccascsg | | UGACUCUCAGG | |
| AD- | asusccaaAfuAfAf | 1947 | VPusCfsgaaGfauucauu | 2272 | GUAUCCAAAUAA | 2614 |
| 1784277.1 | Ufgaaucuucsgsa | | AfuUfuggausasc | | UGAAUCUUCGG | |
| AD- | asusccaaAfuAfAf | 1947 | VPusCfsgadAg(Agn)u | 2273 | GUAUCCAAAUAA | 2614 |
| 1784278.1 | Ufgaaucuucsgsa | | ucauuAfuUfuggausasc | | UGAAUCUUCGG | |
| AD- | ususgacuUfuGfUf | 1948 | VPusCfsaudGc(Tgn)gu | 2274 | CCUUGACUUUGU | 2615 |
| 1784279.1 | Ufcacagcausgsa | | gaacAfaAfgucaasgsg | | UCACAGCAUGU | |
| AD- | asgsaucuAfcCfUf | 1949 | VPusCfsaaaUfcaccaag | 2275 | ACAGAUCUACCU | 2616 |
| 1784280.1 | Ufggugauuusgsa | | GfuAfgaucusgsu | | UGGUGAUUUGG | |
| AD- | asusgguaGfuAfGf | 1950 | VPusUfsacaGfaaaaacu | 2276 | UUAUGGUAGUAG | 2617 |
| 1784281.1 | Ufuuuucugusasa | | AfcUfaccausasa | | UUUUUCUGUAA | |
| AD- | asusgguaGfuAfGf | 1950 | VPusUfsacdAg(Agn)aa | 2277 | UUAUGGUAGUAG | 2617 |
| 1784282.1 | Ufuuuucugusasa | | aacuAfcUfaccausasa | | UUUUUCUGUAA | |
| AD- | cscsuugaCfuUfUf | 195 | VPusUfsgcdTg(Tgn)ga | 2278 | UACCUUGACUUU | 2618 |
| 1784283.1 | Gfuucacagcsasa | | acaaAfgUfcaaggsusa | | GUUCACAGCAU | |
| AD- | cscsuggaUfuGfUf | 1952 | VPusUfsucdCu(Tgn)ga | 2279 | GACCUGGAUUGU | 2619 |
| 1784284.1 | Gfcucaaggasasa | | gcacAfaUfccaggsusc | | GCUCAAGGAAC | |
| AD- | gsasgcuaGfuUfAf | 1953 | VPusUfsgadTu(Tgn)gc | 2280 | UUGAGCUAGUUA | 2620 |
| 1784285.1 | Afggcaaaucsasa | | cuuaAfcUfagcucsasa | | AGGCAAAUCAG | |
| AD- | ascsugaaGfaAfCf | 1954 | VPusUfsgadTu(Tgn)gc | 2281 | CCACUGAAGAAC | 2621 |
| 1784286.1 | Afggcaaaucsasa | | cuguUfcUfucagusgsg | | AGGCAAAUCAA | |
| AD- | usgsaagaAfcAfGf | 1955 | VPusUfsuudGa(Tgn)uu | 2282 | ACUGAAGAACAG | 2622 |
| 1784287.1 | Gfcaaaucaasasa | | gccuGfuUfcuucasgsu | | GCAAAUCAAAG | |
| AD- | csusccucUfuCfUf | 1956 | VPusCfsacaCfauuccag | 2283 | CCCUCCUCUUCU | 2623 |
| 1784288.1 | Gfgaaugugusgsa | | AfaGfaggagsgsg | | GGAAUGUGUGA | |
| AD- | csusccucUfuCfUf | 1956 | VPusCfsacdAc(Agn)uu | 2284 | CCCUCCUCUUCU | 2623 |
| 1784289.1 | Gfgaaugugusgsa | | ccagAfaGfaggagsgsg | | GGAAUGUGUGA | |
| AD- | gscsuuucAfaCfGf | 1957 | VPusUfscaaAfcuccacg | 2285 | AUGCUUUCAACG | 2624 |
| 1784290.1 | Ufggaguuugsasa | | UfuGfaaagcsasu | | UGGAGUUUGAU | |
| AD- | usgscuuuCfaAfCf | 1958 | VPusCfsaaaCfuccacgu | 2286 | CAUGCUUUCAAC | 2625 |
| 1784291.1 | Gfuggaguuusgsa | | UfgAfaagcasusg | | GUGGAGUUUGA | |
| AD- | usgscuuuCfaAfCf | 1958 | VPusCfsaadAc(Tgn)cc | 2287 | CAUGCUUUCAAC | 2625 |
| 1784292.1 | Gfuggaguuusgsa | | acguUfgAfaagcasusg | | GUGGAGUUUGA | |
| AD- | csasgguaAfaAfUf | 1959 | VPusAfsaudCa(Tgn)ga | 2288 | AUCAGGUAAAAU | 2626 |
| 1784293.1 | Afgucaugaususa | | cuauUfuUfaccugsasu | | AGUCAUGAUUC | |
| AD- | csusguauCfcAfAf | 1960 | VPusGfsaudTc(Agn)uu | 2289 | GUCUGUAUCCAA | 2627 |
| 1784294.1 | Afuaaugaauscsa | | auuuGfgAfuacagsasc | | AUAAUGAAUCU | |
| AD- | asasggcaAfaUfCf | 1961 | VPusUfsaudTu(Tgn)ac | 2290 | UUAAGGCAAAUC | 2628 |
| 1784295.1 | Afgguaaaausasa | | cugaUfuUfgccuusasa | | AGGUAAAAUAG | |
| AD- | cscsuccuUfcCfUf | 1962 | VPusCfscaaGfgauucag | 2291 | GGCCUCCUUCCU | 2629 |
| 1784296.1 | Gfaauccuugsgsa | | GfaAfggaggscsc | | GAAUCCUUGGA | |
| AD- | ususccuuCfaAfAf | 1963 | VPusGfsacdCa(Tgn)cu | 2292 | GCUUCCUUCAAA | 2630 |
| 1784297.1 | Ufaagaugguscsa | | uauuUfgAfaggaasgsc | | UAAGAUGGUCC | |
| AD- | asusgaaaUfuCfCf | 1964 | VPusUfsuadAg(Tgn)uu | 2293 | UGUUGAAAUUCC | 2631 |
| 1784298.1 | Gfuaaacuuasasa | | acggAfaUfuucaascsa | | GUAAACUUAAC | |
| AD- | ascsacucAfuAfCf | 1965 | VPusAfsuadCu(Tgn)gg | 2294 | CGACACUCAUAC | 2632 |
| 1784299.1 | Afgccaaguasusa | | cuguAfuGfaguguscsg | | AGCCAAGUAUG | |
| AD- | gscsacagAfuCfUf | 1966 | VPusUfscacCfaagguag | 2295 | AAGCACAGAUCU | 2633 |
| 1784300.1 | Afccuuggugsasa | | AfuCfugugcsusu | | ACCUUGGUGAU | |
| AD- | csusuucaAfcGfUf | 1967 | VPusAfsucaAfacuccac | 2296 | UGCUUUCAACGU | 2634 |
| 1784301.1 | Gfgaguuugasusa | | GfuUfgaaagscsa | | GGAGUUUGAUG | |
| AD- | usasgcuaAfgCfAf | 1968 | VPusGfsgudAg(Agn)u | 2297 | UUUAGCUAAGCA | 2635 |
| 1784302.1 | Cfagaucuacscsa | | cugugCfuUfagcuasasa | | CAGAUCUACCU | |
| AD- | ususgugaUfaCfAf | 1969 | VPusAfsaauAfuacucug | 2298 | AGUUGUGAUACA | 2636 |
| 1784303.1 | Gfaguauauususa | | UfaUfcacaascsu | | GAGUAUAUUUC | |
| AD- | ascsucauAfcAfGf | 1970 | VPusUfscauAfcuuggcu | 2299 | ACACUCAUACAG | 2637 |
| 1784304.1 | Cfcaaguaugsasa | | GfuAfugagusgsu | | CCAAGUAUGAC | |
| AD- | asgsuuaaGfgCfAf | 1971 | VPusUfsuadCc(Tgn)ga | 2300 | CUAGUUAAGGCA | 2638 |
| 1784305.1 | Afaucagguasasa | | uuugCfcUfuaacusasg | | AAUCAGGUAAA | |
| AD- | gsusugugAfuAfCf | 1972 | VPusAfsauaUfacucugu | 2301 | GAGUUGUGAUAC | 2639 |
| 1784306.1 | Afgaguauaususa | | AfuCfacaacsusc | | AGAGUAUAUUU | |
| AD- | gsusugugAfuAfCf | 1972 | VPusAfsaudAu(Agn)c | 2302 | GAGUUGUGAUAC | 2639 |
| 1784307.1 | Afgaguanaususa | | ucuguAfuCfacaacsusc | | AGAGUAUAUUU | |
| AD- | usgsacauCfgAfCf | 1973 | VPusCfsuguAfugagugu | 2303 | GUUGACAUCGAC | 2640 |
| 1784308.1 | Afcucauacasgsa | | CfgAfugucasasc | | ACUCAUACAGC | |
| AD- | asgsauaaAfuUfGf | 1974 | VPusUfsuadAc(Tgn)ag | 2304 | CAAGAUAAAUUG | 2641 |
| 1784309.1 | Afgcuaguuasasa | | cucaAfuUfuaucususg | | AGCUAGUUAAG | |
| AD- | usasgguaUfuUfUf | 1975 | VPusAfsaccUfucaaaaa | 2305 | UCUAGGUAUUUU | 2642 |
| 1784310.1 | Ufuugaaggususa | | AfaUfaccuasgsa | | UUUGAAGGUUG | |
| AD- | usasgguaUfuUfUf | 1975 | VPusAfsacdCu(Tgn)ca | 2306 | UCUAGGUAUUUU | 2642 |
| 1784311.1 | Ufuugaaggususa | | aaaaAfaUfaccuasgsa | | UUUGAAGGUUG | |
| AD- | usgsgugcUfuUfGf | 1976 | VPusCfsuacCfauaaaca | 2307 | GUUGGUGCUUUG | 2643 |
| 1784312.1 | Ufuuaugguasgsa | | AfaGfcaccasasc | | UUUAUGGUAGU | |
| AD- | usgsugauAfcAfGf | 1977 | VPusGfsaaaUfauacucu | 2308 | GUUGUGAUACAG | 2644 |
| 1784313.1 | Afguanauuuscsa | | GfuAfucacasasc | | AGUAUAUUUCC | |
| AD- | uscsuucuGfgAfAf | 1978 | VPusAfsggdTc(Agn)ca | 2309 | CCUCUUCUGGAA | 2645 |
| 1784314.1 | Ufgugugaccsusa | | cauuCfcAfgaagasgsg | | UGUGUGACCUG | |
| AD- | csusggccGfuUfCf | 1979 | VPusAfsaaaUfaccuaga | 2310 | GACUGGCCGUUC | 2646 |
| 1784315.1 | Ufagguauuususa | | AfcGfgccagsusc | | UAGGUAUUUUU | |
| AD- | asuscaggUfaAfAf | 1980 | VPusUfscadTg(Agn)cu | 2311 | AAAUCAGGUAAA | 2647 |
| 1784316.1 | Afuagucaugsasa | | auuuUfaCfcugaususu | | AUAGUCAUGAU | |
| AD- | ususccauUfaAfAf | 1981 | VPusUfsgcdCc(Tgn)uu | 2312 | GAUUCCAUUAAA | 2648 |
| 1784317.1 | Afcaaagggcsasa | | guuuUfaAfuggaasusc | | ACAAAGGGCAA | |
| AD- | csasagagUfgCfUf | 1982 | VPusUfsagdTg(Agn)ag | 2313 | GGCAAGAGUGCU | 2649 |
| 1784318.1 | Gfacuucacusasa | | ucagCfaCfucuugscsc | | GACUUCACUAA | |
| AD- | ususucaaCfgUfGf | 1983 | VPusCfsaucAfaacucca | 2314 | GCUUUCAACGUG | 2650 |
| 1784319.1 | Gfaguuugausgsa | | CfgUfugaaasgsc | | GAGUUUGAUGA | |
| AD- | ususggugCfuUfUf | 1984 | VPusUfsaccAfuaaacaa | 2315 | GGUUGGUGCUUU | 2651 |
| 1784320.1 | Gfuuuauggusasa | | AfgCfaccaascsc | | GUUUAUGGUAG | |
| AD- | asusggugCfuUfUf | 1984 | VPusUfsacdCa(Tgn)aa | 2316 | GGUUGGUGCUUU | 2651 |
| 1784321.1 | Gfuuuauggusasa | | acaaAfgCfaccaascsc | | GUUUAUGGUAG | |
| AD- | csascucaUfaCfAf | 1985 | VPusCfsauaCfuuggcug | 2317 | GACACUCAUACA | 2652 |
| 1784322.1 | Gfccaaguausgsa | | UfaUfgagugsusc | | GCCAAGUAUGA | |
| AD- | asusaaagUfaCfCf | 1986 | VPusAfscaaAfgucaagg | 2318 | GAAUAAAGUACC | 2653 |
| 1784323.1 | Ufugacuuugsusa | | UfaCfuuuaususc | | UUGACUUUGUU | |
| AD- | asusgacuUfuUfGf | 1987 | VPusCfsucdTg(Tgn)aa | 2319 | UAAUGACUUUUG | 2654 |
| 1784324.1 | Afauuacagasgsa | | uucaAfaAfgucaususa | | AAUUACAGAGA | |
| AD- | gsuscaugAfuUfCf | 1988 | VPusAfscauUfacauaga | 2320 | UAGUCAUGAUUC | 2655 |
| 1784325.1 | Ufauguaaugsusa | | AfuCfaugacsusa | | UAUGUAAUGUA | |
| AD- | gsasccugGfaUfUf | 1989 | VPusCfscudTg(Agn)gc | 2321 | GUGACCUGGAUU | 2656 |
| 1784326.1 | Gfugcucaagsgsa | | acaaUfcCfaggucsasc | | GUGCUCAAGGA | |
| AD- | gsascaucGfaCfAf | 1990 | VPusGfscudGu(Agn)u | 2322 | UUGACAUCGACA | 2657 |
| 1784327.1 | Cfucauacagscsa | | gagugUfcGfaugucsasa | | CUCAUACAGCC | |
| AD- | gsasagaaCfaGfGf | 1991 | VPusCfsuudTg(Agn)uu | 2323 | CUGAAGAACAGG | 2658 |
| 1784328.1 | Cfaaaucaaasgsa | | ugccUfgUfucuucsasg | | CAAAUCAAAGC | |
| AD- | csgsuaaaCfuUfAf | 1992 | VPusCfscauUfgaaguua | 2324 | UCCGUAAACUUA | 2659 |
| 1784329.1 | Afcuucaaugsgsa | | AfgUfuuacgsgsa | | ACUUCAAUGGG | |
| AD- | asgsguaaAfaUfAf | 1993 | VPusGfsaadTc(Agn)ug | 2325 | UCAGGUAAAAUA | 2660 |
| 1784330.1 | Gfucaugauuscsa | | acuaUfuUfuaccusgsa | | GUCAUGAUUCU | |
| AD- | gsusaccuUfgAfCf | 1994 | VPusUfsgudGa(Agn)ca | 2326 | AAGUACCUUGAC | 2661 |
| 1784331.1 | Ufuuguucacsasa | | aaguCfaAfgguacsusu | | UUUGUUCACAG | |
| AD- | cscsguucUfaGfGf | 1995 | VPusCfsaaaAfaaauacc | 2327 | GGCCGUUCUAGG | 2662 |
| 1784332.1 | Ufauuuuuuusgsa | | UfaGfaacggscsc | | UAUUUUUUUGA | |
| AD- | ususuaugGfuAfGf | 1996 | VPusAfsgaaAfaacuacu | 2328 | UGUUUAUGGUAG | 2663 |
| 1784333.1 | Ufaguuuuucsusa | | AfcCfauaaascsa | | UAGUUUUUCUG | |
| AD- | csgsuggaGfuUfUf | 1997 | VPusGfsagdAg(Tgn)ca | 2329 | AACGUGGAGUUU | 2664 |
| 1784334.1 | Gfaugacucuscsa | | ucaaAfcUfccacgsusu | | GAUGACUCUCA | |
| AD- | ususcaacGfuGfGf | 1998 | VPusUfscadTc(Agn)aa | 2330 | CUUUCAACGUGG | 2665 |
| 1784335.1 | Afguuugaugsasa | | cuccAfcGfuugaasasg | | AGUUUGAUGAC | |
| AD- | gsasguugUfgAfUf | 1999 | VPusUfsaudAc(Tgn)cu | 2331 | UAGAGUUGUGAU | 2666 |
| 1784336.1 | Afcagaguausasa | | guauCfaCfaacucsusa | | ACAGAGUAUAU | |
| AD- | usasccuuGfaCfUf | 2000 | VPusCfsuguGfaacaaag | 2332 | AGUACCUUGACU | 2667 |
| 1784337.1 | Ufuguucacasgsa | | UfcAfagguascsu | | UUGUUCACAGC | |
| AD- | usasccuuGfaCfUf | 2000 | VPusCfsugdTg(Agn)ac | 2333 | AGUACCUUGACU | 2667 |
| 1784338.1 | Ufuguucacasgsa | | aaagUfcAfagguascsu | | UUGUUCACAGC | |
| AD- | usasgaguUfgUfGf | 2001 | VPusUfsacdTc(Tgn)gu | 2334 | AUUAGAGUUGUG | 2668 |
| 1784339.1 | Afuacagagusasa | | aucaCfaAfcucuasasu | | AUACAGAGUAU | |
| AD- | usgsagugCfaAfAf | 2002 | VPusGfsugdCu(Agn)u | 2335 | GUUGAGUGCAAA | 2669 |
| 1784340.1 | Ufccauagcascsa | | ggauuUfgCfacucasasc | | UCCAUAGCACA | |
| AD- | csasaaucAfgGfUf | 2003 | VPusUfsgadCu(Agn)u | 2336 | GGCAAAUCAGGU | 2670 |
| 1784341.1 | Afaaauagucsasa | | uuuacCfuGfauuugscsc | | AAAAUAGUCAU | |
| AD- | asasgcacAfgAfUf | 2004 | VPusAfsccaAfgguagau | 2337 | CUAAGCACAGAU | 2671 |
| 1784342.1 | Cfuaccuuggsusa | | CfuGfugcuusasg | | CUACCUUGGUG | |
| AD- | ascsuuugUfuCfAf | 2005 | VPusCfsuacAfugcugug | 2338 | UGACUUUGUUCA | 2672 |
| 1784343.1 | Cfagcauguasgsa | | AfaCfaaaguscsa | | CAGCAUGUAGG | |
| AD- | usgsgccgUfuCfUf | 2006 | VPusAfsaaaAfuaccuag | 2339 | ACUGGCCGUUCU | 2673 |
| 1784344.1 | Afgguauuuususa | | AfaCfggccasgsu | | AGGUAUUUUUU | |
| AD- | gscscaagUfaUfGf | 2007 | VPusAfsggdGa(Agn)g | 2340 | CAGCCAAGUAUG | 2674 |
| 1784345.1 | Afcccuucccsusa | | ggucaUfaCfuuggcsusg | | ACCCUUCCCUG | |
| AD- | usasugguAfgUfAf | 2008 | VPusAfscagAfaaaacua | 2341 | UUUAUGGUAGUA | 2675 |
| 1784346.1 | Gfuuuuucugsusa | | CfuAfccauasasa | | GUUUUUCUGUA | |
| AD- | asasuugaGfcUfAf | 2009 | VPusUfsugdCc(Tgn)ua | 2342 | UAAAUUGAGCUA | 2676 |
| 1784347.1 | Gfuuaaggcasasa | | acuaGfcUfcaauususa | | GUUAAGGCAAA | |
| AD- | ascsuaaaAfuGfCf | 2010 | VPusUfsuuaAfaagcagc | 2343 | UGACUAAAAUGC | 2677 |
| 1784348.1 | Ufgcuuuuaasasa | | AfuUfuuaguscsa | | UGCUUUUAAAA | |
| AD- | ascsuucaCfuUfGf | 2011 | VPusUfsccdAg(Tgn)ga | 2344 | GAACUUCACUUG | 2678 |
| 1784349.1 | Gfuucacuggsasa | | accaAfgUfgaagususc | | GUUCACUGGAA | |
| AD- | uscsuaggUfaUfUf | 2012 | VPusCfscuuCfaaaaaaa | 2345 | GUUCUAGGUAUU | 2679 |
| 1784350.1 | Ufuuuugaagsgsa | | UfaCfcuagasasc | | UUUUUGAAGGU | |
| AD- | asgscacaGfaUfCf | 2013 | VPusCfsaccAfagguaga | 2346 | UAAGCACAGAUC | 2680 |
| 1784351.1 | Ufaccuuggusgsa | | UfcUfgugcususa | | UACCUUGGUGA | |
| AD- | gscscguuCfuAfGf | 2014 | VPusAfsaaaAfaauaccu | 2347 | UGGCCGUUCUAG | 2681 |
| 1784352.1 | Gfuauuuuuususa | | AfgAfacggcscsa | | GUAUUUUUUUG | |
| AD- | csusaaaaUfgCfUf | 2015 | VPusUfsuuuAfaaagcag | 2348 | GACUAAAAUGCU | 2682 |
| 1784353.1 | Gfcuuuuaaasasa | | CfaUfuuuagsusc | | GCUUUUAAAAC | |
| AD- | gsasacagGfcAfAf | 2016 | VPusAfsagdCu(Tgn)ug | 2349 | AAGAACAGGCAA | 2683 |
| 1784354.1 | Afucaaagcususa | | auuuGfcCfuguucsusu | | AUCAAAGCUUC | |
| AD- | usgscuuuGfuUfUf | 2017 | VPusCfsuacUfaccauaa | 2350 | GGUGCUUUGUUU | 2684 |
| 1784355.1 | Afugguaguasgsa | | AfcAfaagcascsc | | AUGGUAGUAGU | |
| AD- | asasuuagAfgUfUf | 2018 | VPusUfscudGu(Agn)u | 2351 | AUAAUUAGAGUU | 2685 |
| 1784356.1 | Gfugauacagsasa | | cacaaCfuCfuaauusasu | | GUGAUACAGAG | |
| AD- | csusgguuGfgUfGf | 2019 | VPusAfsuaaAfcaaagca | 2352 | GGCUGGUUGGUG | 2686 |
| 1784357.1 | Cfuuuguuuasusa | | CfcAfaccagscsc | | CUUUGUUUAUG | |
| AD- | uscscuucAfaAfUf | 2020 | VPusGfsgadCc(Agn)uc | 2353 | CUUCCUUCAAAU | 2687 |
| 1784358.1 | Afagauggucscsa | | uuauUfuGfaaggasasg | | AAGAUGGUCCC | |
| AD- | gscscuccUfuCfCf | 2021 | VPusCfsaadGg(Agn)uu | 2354 | UGGCCUCCUUCC | 2688 |
| 1784359.1 | Ufgaauccuusgsa | | caggAfaGfgaggcscsa | | UGAAUCCUUGG | |
| AD- | gsasuucuAfuGfUf | 2022 | VPusGfsgudTu(Agn)ca | 2355 | AUGAUUCUAUGU | 2689 |
| 1784360.1 | Afauguaaacscsa | | uuacAfuAfgaaucsasu | | AAUGUAAACCA | |
| AD- | usgsguugGfuGfCf | 2023 | VPusCfsauaAfacaaagc | 2356 | GCUGGUUGGUGC | 2690 |
| 1784361.1 | Ufuuguuuausgsa | | AfcCfaaccasgsc | | UUUGUUUAUGG | |
| AD- | csuscauaCfaGfCf | 2024 | VPusGfsucaUfacuuggc | 2357 | CACUCAUACAGC | 2691 |
| 1784362.1 | Cfaaguaugascsa | | UfgUfaugagsusg | | CAAGUAUGACC | |
| AD- | csuscauaCfaGfCf | 2024 | VPusGfsucdAu(Agn)c | 2358 | CACUCAUACAGC | 2691 |
| 1784363.1 | Cfaaguaugascsa | | uuggcUfgUfaugagsusg | | CAAGUAUGACC | |
| AD- | asuscgacAfcUfCf | 2025 | VPusUfsugdGc(Tgn)gu | 2359 | ACAUCGACACUC | 2692 |
| 1784364.1 | Afuacagccasasa | | augaGfuGfucgausgsu | | AUACAGCCAAG | |
| AD- | gscsacugGfcAfUf | 2026 | VPusGfsgadAg(Tgn)cc | 2360 | GAGCACUGGCAU | 2693 |
| 1784365.1 | Afaggacuucscsa | | uuauGfcCfagugcsusc | | AAGGACUUCCC | |
| AD- | asascgugGfaGfUf | 2027 | VPusGfsagdTc(Agn)uc | 2361 | UCAACGUGGAGU | 2694 |
| 1784366.1 | Ufugaugacuscsa | | aaacUfcCfacguusgsa | | UUGAUGACUCU | |
| AD- | gscsaaauCfaGfGf | 2028 | VPusGfsacuAfuuuuacc | 2362 | AGGCAAAUCAGG | 2695 |
| 1784367.1 | Ufaaaauaguscsa | | UfgAfuuugcscsu | | UAAAAUAGUCA | |
| AD- | gscsaaauCfaGfGf | 2028 | VPusGfsacdTa(Tgn)uu | 2363 | AGGCAAAUCAGG | 2695 |
| 1784368.1 | Ufaaaauaguscsa | | uaccUfgAfuuugcscsu | | UAAAAUAGUCA | |
| AD- | csusucagAfaAfGf | 2029 | VPusAfscauCfaacaacu | 2364 | GCCUUCAGAAAG | 2696 |
| 1784369.1 | Ufuguugaugsusa | | UfuCfugaagsgsc | | UUGUUGAUGUG | |
| AD- | csusucagAfaAfGf | 2029 | VPusAfscadTc(Agn)ac | 2365 | GCCUUCAGAAAG | 2696 |
| 1784370.1 | Ufuguugaugsusa | | aacuUfuCfugaagsgsc | | UUGUUGAUGUG | |
| AD- | asasaucaGfgUfAf | 2030 | VPusAfsugdAc(Tgn)au | 2366 | GCAAAUCAGGUA | 2697 |
| 1784371.1 | Afaauagucasusa | | uuuaCfcUfgauuusgsc | | AAAUAGUCAUG | |
| AD- | asgsgcaaAfuCfAf | 2031 | VPusCfsuauUfuuaccug | 2367 | UAAGGCAAAUCA | 2698 |
| 1784372.1 | Gfguaaaauasgsa | | AfuUfugccususa | | GGUAAAAUAGU | |
| AD- | gsgsgcaaGfaGfUf | 2032 | VPusUfsgadAg(Tgn)ca | 2368 | AAGGGCAAGAGU | 2699 |
| 1784373.1 | Gfcugacuucsasa | | gcacUfcUfugcccsusu | | GCUGACUUCAC | |
| AD- | gsgsccguUfcUfAf | 2033 | VPusAfsaaaAfauaccua | 2369 | CUGGCCGUUCUA | 2700 |
| 1784375.1 | Gfguauuuuususa | | GfaAfcggccsasg | | GGUAUUUUUUU | |
| AD- | csgsggccUfuCfAf | 2034 | VPusAfsacaAfcuuucug | 2370 | ACCGGGCCUUCA | 2701 |
| 1784377.1 | Gfaaaguugususa | | AfaGfgcccgsgsu | | GAAAGUUGUUG | |
| AD- | gsgscaaaUfcAfGf | 2035 | VPusAfscuaUfuuuaccu | 2371 | AAGGCAAAUCAG | 2702 |
| 1784378.1 | Gfuaaaauagsusa | | GfaUfuugccsusu | | GUAAAAUAGUC | |
| AD- | gsasggauCfcUfCf | 2036 | VPusGfsaccAfuuguuga | 2372 | CUGAGGAUCCUC | 2703 |
| 1784379.1 | Afacaaugguscsa | | GfgAfuccucsasg | | AACAAUGGUCA | |
| AD- | gsasggauCfcUfCf | 2036 | VPusGfsacdCa(Tgn)ug | 2373 | CUGAGGAUCCUC | 2703 |
| 1784380.1 | Afacaaugguscsa | | uugaGfgAfuccucsasg | | AACAAUGGUCA | |
| AD- | ususcacuUfgGfUf | 2037 | VPusGfsuudCc(Agn)g | 2374 | ACUUCACUUGGU | 2704 |
| 1784381.1 | Ufcacuggaascsa | | ugaacCfaAfgugaasgsu | | UCACUGGAACA | |
| AD- | asgsaacuGfaUfGf | 2038 | VPusAfsgudTg(Tgn)cc | 2375 | GAAGAACUGAUG | 2705 |
| 1784382.1 | Gfuggacaacsusa | | accaUfcAfguucususc | | GUGGACAACUG | |
| AD- | asasuaaaGfuAfCf | 2039 | VPusCfsaaaGfucaaggu | 2376 | AGAAUAAAGUAC | 2706 |
| 1784383.1 | Cfuugacuuusgsa | | AfcUfuuauuscsu | | CUUGACUUUGU | |
| AD- | asasuaaaGfuAfCf | 2039 | VPusCfsaadAg(Tgn)ca | 2377 | AGAAUAAAGUAC | 2706 |
| 1784384.1 | Cfuugacuuusgsa | | agguAfcUfuuauuscsu | | CUUGACUUUGU | |
| AD- | csusuuguUfcAfCf | 2040 | VPusCfscuaCfaugcugu | 2378 | GACUUUGUUCAC | 2707 |
| 1784385.1 | Afgcauguagsgsa | | GfaAfcaaagsusc | | AGCAUGUAGGG | |
| AD- | csusuuguUfcAfCf | 2040 | VPusCfscudAc(Agn)ug | 2379 | GACUUUGUUCAC | 2707 |
| 1784386.1 | Afgcauguagsgsa | | cuguGfaAfcaaagsusc | | AGCAUGUAGGG | |
| AD- | asasuaagAfaUfAf | 2041 | VPusCfsaadGg(Tgn)ac | 2380 | GAAAUAAGAAUA | 2708 |
| 1784387.1 | Afaguaccuusgsa | | uuuaUfuCfuuauususc | | AAGUACCUUGA | |
| AD- | asgsuaguUfuUfUf | 2042 | VPusUfsgudGu(Tgn)ac | 2381 | GUAGUAGUUUUU | 2709 |
| 1784388.1 | Cfuguaacacsasa | | agaaAfaAfcuacusasc | | CUGUAACACAG | |
| AD- | cscsaaguAfuGfAf | 2043 | VPusCfsaggGfaaggguc | 2382 | AGCCAAGUAUGA | 2710 |
| 1784389.1 | Cfccuucccusgsa | | AfuAfcuuggscsu | | CCCUUCCCUGA | |
| AD- | ususgaguGfcAfAf | 2044 | VPusUfsgcdTa(Tgn)gg | 2383 | GGUUGAGUGCAA | 2711 |
| 1784390.1 | Afuccauagcsasa | | auuuGfcAfcucaascsc | | AUCCAUAGCAC | |
| AD- | gsgsccuuCfaGfAf | 2045 | VPusUfscaaCfaacuuuc | 2384 | CGGGCCUUCAGA | 2712 |
| 1784391.1 | Afaguuguugsasa | | UfgAfaggccscsg | | AAGUUGUUGAU | |
| AD- | asgsgaucCfuCfAf | 2046 | VPusUfsgadCc(Agn)uu | 2385 | UGAGGAUCCUCA | 2713 |
| 1784392.1 | Afcaauggucsasa | | guugAfgGfauccuscsa | | ACAAUGGUCAU | |
| AD- | asusuagaGfuUfGf | 2047 | VPusCfsucdTg(Tgn)au | 2386 | UAAUUAGAGUUG | 2714 |
| 1784393.1 | Ufgauacagasgsa | | cacaAfcUfcuaaususa | | UGAUACAGAGU | |
| AD- | csasacguGfgAfGf | 2048 | VPusAfsgudCa(Tgn)ca | 2387 | UUCAACGUGGAG | 2715 |
| 1784394.1 | Ufuugaugacsusa | | aacuCfcAfcguugsasa | | UUUGAUGACUC | |
| AD- | gsascuuuUfgAfAf | 2049 | VPusAfsucdTc(Tgn)gu | 2388 | AUGACUUUUGAA | 2716 |
| 1784395.1 | Ufuacagagasusa | | aauuCfaAfaagucsasu | | UUACAGAGAUA | |
| AD- | usgsaggaUfcCfUf | 2050 | VPusAfsccaUfuguugag | 2389 | CCUGAGGAUCCU | 2717 |
| 1784396.1 | Cfaacaauggsusa | | GfaUfccucasgsg | | CAACAAUGGUC | |
| AD- | gsasguuuGfaUfGf | 2051 | VPusUfsccdTg(Agn)ga | 2390 | UGGAGUUUGAUG | 2718 |
| 1784397.1 | Afcucucaggsasa | | gucaUfcAfaacucscsa | | ACUCUCAGGAC | |
| AD- | ususuuaaAfaCfAf | 2052 | VPusUfsacdTu(Tgn)cc | 2391 | GCUUUUAAAACA | 2719 |
| 1784398.1 | Ufaggaaagusasa | | uaugUfuUfuaaaasgsc | | UAGGAAAGUAG | |
| AD- | ususauggUfaGfUf | 2053 | VPusCfsagaAfaaacuac | 2392 | GUUUAUGGUAGU | 2720 |
| 1784399.1 | Afguuuuucusgsa | | UfaCfcauaasasc | | AGUUUUUCUGU | |
| AD- | asascuucAfcUfUf | 2054 | VPusCfscagUfgaaccaa | 2393 | AGAACUUCACUU | 2721 |
| 1784400.1 | Gfguucacugsgsa | | GfuGfaaguuscsu | | GGUUCACUGGA | |
| AD- | asasauugAfgCfUf | 2055 | VPusUfsgcdCu(Tgn)aa | 2394 | AUAAAUUGAGCU | 2722 |
| 1784401.1 | Afguuaaggcsasa | | cuagCfuCfaauuusasu | | AGUUAAGGCAA | |
| AD- | ususuguuUfaUfGf | 2056 | VPusAfsaacUfacuacca | 2395 | GCUUUGUUUAUG | 2723 |
| 1784402.1 | Gfuaguaguususa | | UfaAfacaaasgsc | | GUAGUAGUUUU | |
| AD- | ususuguuUfaUfGf | 2056 | VPusAfsaadCu(Agn)cu | 2396 | GCUUUGUUUAUG | 2723 |
| 1784403.1 | Gfuaguaguususa | | accaUfaAfacaaasgsc | | GUAGUAGUUUU | |
| AD- | asasgggcAfaGfAf | 2057 | VPusAfsagdTc(Agn)gc | 2397 | CAAAGGGCAAGA | 2724 |
| 1784404.1 | Gfugcugacususa | | acucUfuGfcccuususg | | GUGCUGACUUC | |
| AD- | gsgsaguuUfgAfUf | 2058 | VPusCfscugAfgagucau | 2398 | GUGGAGUUUGAU | 2725 |
| 1784405.1 | Gfacucucagsgsa | | CfaAfacuccsasc | | GACUCUCAGGA | |
| AD- | gsgsgccuUfcAfGf | 2059 | VPusCfsaacAfacuuucu | 2399 | CCGGGCCUUCAG | 2726 |
| 1784406.1 | Afaaguuguusgsa | | GfaAfggcccsgsg | | AAAGUUGUUGA | |
| AD- | gscsaagaGfuGfCf | 2060 | VPusAfsgudGa(Agn)g | 2400 | GGGCAAGAGUGC | 2727 |
| 1784407.1 | Ufgacuucacsusa | | ucagcAfcUfcuugcscsc | | UGACUUCACUA | |
| AD- | asgsccacUfgAfAf | 2061 | VPusUfsugdCc(Tgn)gu | 2401 | UCAGCCACUGAA | 2728 |
| 1784408.1 | Gfaacaggcasasa | | ucuuCfaGfuggcusgsa | | GAACAGGCAAA | |
| AD- | asusuccaUfuAfAf | 2062 | VPusGfscccUfuuguuuu | 2402 | GGAUUCCAUUAA | 2729 |
| 1784409.1 | Afacaaagggscsa | | AfaUfggaauscsc | | AACAAAGGGCA | |
| AD- | asusuccaUfuAfAf | 2062 | VPusGfsccdCu(Tgn)ug | 2403 | GGAUUCCAUUAA | 2729 |
| 1784410.1 | Afacaaagggscsa | | uuuuAfaUfggaauscsc | | AACAAAGGGCA | |
| AD- | gsusaguuUfuUfCf | 2063 | VPusCfsugdTg(Tgn)ua | 2404 | UAGUAGUUUUUC | 2730 |
| 1784411.1 | Ufguaacacasgsa | | cagaAfaAfacuacsusa | | UGUAACACAGA | |
| AD- | gsgsuauuUfuUfUf | 2064 | VPusCfscaaCfcuucaaa | 2405 | UAGGUAUUUUUU | 2731 |
| 1784412.1 | Ufgaagguugsgsa | | AfaAfauaccsusa | | UGAAGGUUGGC | |
| AD- | uscscaaaUfaAfUf | 2065 | VPusCfscgaAfgauucau | 2406 | UAUCCAAAUAAU | 2732 |
| 1784413.1 | Gfaaucuucgsgsa | | UfaUfuuggasusa | | GAAUCUUCGGG | |
| AD- | asasacauAfgGfAf | 2066 | VPusCfsaudTc(Tgn)ac | 2407 | UAAAACAUAGGA | 2733 |
| 1784414.1 | Afaguagaausgsa | | uuucCfuAfuguuususa | | AAGUAGAAUGG | |
| AD- | asusgacuCfuCfAf | 2067 | VPusUfsgcdTu(Tgn)gu | 2408 | UGAUGACUCUCA | 2734 |
| 1784415.1 | Gfgacaaagcsasa | | ccugAfgAfgucauscsa | | GGACAAAGCAG | |
| AD- | asgscuagUfuAfAf | 2068 | VPusCfsugaUfuugccuu | 2409 | UGAGCUAGUUAA | 2735 |
| 1784416.1 | Gfgcaaaucasgsa | | AfaCfuagcuscsa | | GGCAAAUCAGG | |
| AD- | cscsugagGfaUfCf | 2069 | VPusCfsaudTg(Tgn)ug | 2410 | UCCCUGAGGAUC | 2736 |
| 1784417.1 | Cfucaacaausgsa | | aggaUfcCfucaggsgsa | | CUCAACAAUGG | |
| AD- | gsgsuuggUfgCfUf | 2070 | VPusCfscauAfaacaaag | 2411 | CUGGUUGGUGCU | 2737 |
| 1784418.1 | Ufuguuuaugsgsa | | CfaCfcaaccsasg | | UUGUUUAUGGU | |
| AD- | asgsguauUfuUfUf | 2071 | VPusCfsaacCfuucaaaa | 2412 | CUAGGUAUUUUU | 2738 |
| 1784419.1 | Ufugaagguusgsa | | AfaAfuaccusasg | | UUGAAGGUUGG | |
| AD- | usgsaaucUfuCfGf | 2072 | VPusGfsggaAfacacccg | 2413 | AAUGAAUCUUCG | 2739 |
| 1784420.1 | Gfguguuuccscsa | | AfaGfauucasusu | | GGUGUUUCCCU | |
| AD- | usgsaaucUfuCfGf | 2072 | VPusGfsggdAa(Agn)ca | 2414 | AAUGAAUCUUCG | 2739 |
| 1784421.1 | Gfguguuuccscsa | | cccgAfaGfauucasusu | | GGUGUUUCCCU | |
| AD- | usasguagUfuUfUf | 2073 | VPusGfsuguUfacagaaa | 2415 | GGUAGUAGUUUU | 2740 |
| 1784422.1 | Ufcuguaacascsa | | AfaCfuacuascsc | | UCUGUAACACA | |
| AD- | usasguagUfuUfUf | 2073 | VPusGfsugdTu(Agn)ca | 2416 | GGUAGUAGUUUU | 2740 |
| 1784423.1 | Ufcuguaacascsa | | gaaaAfaCfuacuascsc | | UCUGUAACACA | |
| AD- | gsusuugaUfgAfCf | 2074 | VPusUfsgudCc(Tgn)ga | 2417 | GAGUUUGAUGAC | 2741 |
| 1784424.1 | Ufcucaggacsasa | | gaguCfaUfcaaacsusc | | UCUCAGGACAA | |
| AD- | asasugaaUfcUfUf | 2075 | VPusGfsaadAc(Agn)cc | 2418 | AUAAUGAAUCUU | 2742 |
| 1784425.1 | Cfggguguuuscsa | | cgaaGfaUfucauusasu | | CGGGUGUUUCC | |
| AD- | csasaauaAfuGfAf | 2076 | VPusAfscccGfaagauuc | 2419 | UCCAAAUAAUGA | 2743 |
| 1784426.1 | Afucuuccggsusa | | AfuUfauuugsgsa | | AUCUUCGGGUG | |
| AD- | ususuguuCfaCfAf | 2077 | VPusCfsccuAfcaugcug | 2420 | ACUUUGUUCACA | 2744 |
| 1784427.1 | Gfcauguaggsgsa | | UfgAfacaaasgsu | | GCAUGUAGGGU | |
| AD- | asusugugCfuCfAf | 2078 | VPusAfsugdGg(Tgn)uc | 2421 | GGAUUGUGCUCA | 2745 |
| 1784428.1 | Afggaacccasusa | | cuugAfgCfacaauscsc | | AGGAACCCAUC | |
| AD- | gsusugguGfcUfUf | 2079 | VPusAfsccaUfaaacaaa | 2422 | UGGUUGGUGCUU | 2746 |
| 1784429.1 | Ufguuuauggsusa | | GfcAfccaacscsa | | UGUUUAUGGUA | |
| AD- | gsasaucuUfcGfGf | 2080 | VPusAfsgggAfaacaccc | 2423 | AUGAAUCUUCGG | 2747 |
| 1784430.1 | Gfuguuucccsusa | | GfaAfgauucsasu | | GUGUUUCCCUU | |
| AD- | gsgsuaguAfgUfUf | 2081 | VPusGfsuudAc(Agn)g | 2424 | AUGGUAGUAGUU | 2748 |
| 1784431.1 | Ufuucuguaascsa | | aaaaaCfuAfcuaccsasu | | UUUCUGUAACA | |
| AD- | asgsaacaGfgCfAf | 2082 | VPusAfsgcuUfugauuug | 2425 | GAAGAACAGGCA | 2749 |
| 1784432.1 | Afaucaaagcsusa | | CfcUfguucususc | | AAUCAAAGCUU | |
| AD- | asgsaacaGfgCfAf | 2082 | VPusAfsgcdTu(Tgn)ga | 2426 | GAAGAACAGGCA | 2749 |
| 1784433.1 | Afaucaaagcsusa | | uuugCfcUfguucususc | | AAUCAAAGCUU | |
| AD- | asasaauaGfuCfAf | 2083 | VPusCfsauaGfaaucaug | 2427 | GUAAAAUAGUCA | 2750 |
| 1784434.1 | Ufgauucuausgsa | | AfcUfauuuusasc | | UGAUUCUAUGU | |
| AD- | ascsuggcCfgUfUf | 2084 | VPusAfsaauAfccuagaa | 2428 | GGACUGGCCGUU | 2751 |
| 1784435.1 | Cfuagguauususa | | CfgGfccaguscsc | | CUAGGUAUUUU | |
| AD- | cscscugaGfgAfUf | 2085 | VPusAfsuudGu(Tgn)ga | 2429 | UUCCCUGAGGAU | 2752 |
| 1784436.1 | Cfcucaacaasusa | | ggauCfcUfcagggsasa | | CCUCAACAAUG | |
| AD- | gscsugguUfgGfUf | 2086 | VPusUfsaaaCfaaagcac | 2430 | UGGCUGGUUGGU | 2753 |
| 1784437.1 | Gfcuuuguuusasa | | CfaAfccagcscsa | | GCUUUGUUUAU | |
| AD- | csasgaaaGfuUfGf | 2087 | VPusAfsgcdAc(Agn)uc | 2431 | UUCAGAAAGUUG | 2754 |
| 1784438.1 | Ufugaugugcsusa | | aacaAfcUfuucugsasa | | UUGAUGUGCUG | |
| AD- | ascsuaacUfuCfGf | 2088 | VPusCfscacGfaggaucg | 2432 | UCACUAACUUCG | 2755 |
| 1784439.1 | Afuccucgugsgsa | | AfaGfuuagusgsa | | AUCCUCGUGGC | |
| AD- | cscsuucaGfaAfAf | 2089 | VPusCfsaucAfacaacuu | 2433 | GGCCUUCAGAAA | 2756 |
| 1784440.1 | Gfuuguugausgsa | | UfcUfgaaggscsc | | GUUGUUGAUGU | |
| AD- | usgsagcaCfuGfGf | 2090 | VPusAfsgudCc(Tgn)ua | 2434 | CCUGAGCACUGG | 2757 |
| 1784441.1 | Cfauaaggacsusa | | ugccAfgUfgcucasgsg | | CAUAAGGACUU | |
| AD- | csusaguuAfaGfGf | 2091 | VPusAfsccdTg(Agn)uu | 2435 | AGCUAGUUAAGG | 2758 |
| 1784442.1 | Cfaaaucaggsusa | | ugccUfuAfacuagscsu | | CAAAUCAGGUA | |
| AD- | csusgaggAfuCfCf | 2092 | VPusCfscauUfguugagg | 2436 | CCCUGAGGAUCC | 2759 |
| 1784443.1 | Ufcaacaaugsgsa | | AfuCfcucagsgsg | | UCAACAAUGGU | |
| AD- | gsusuuauGfgUfAf | 2093 | VPusGfsaaaAfacuacua | 2437 | UUGUUUAUGGUA | 2760 |
| 1784444.1 | Gfuaguuuuuscsa | | CfcAfuaaacsasa | | GUAGUUUUUCU | |
| AD- | usgsugacCfuGfGf | 2094 | VPusUfsgadGc(Agn)ca | 2438 | UGUGUGACCUGG | 2761 |
| 1784445.1 | Afuugugcucsasa | | auccAfgGfucacascsa | | AUUGUGCUCAA | |
| AD- | ascsaucgAfcAfCf | 2095 | VPusGfsgcdTg(Tgn)au | 2439 | UGACAUCGACAC | 2762 |
| 1784446.1 | Ufcauacagcscsa | | gaguGfuCfgauguscsa | | UCAUACAGCCA | |
| AD- | gsasuuguGfcUfCf | 2096 | VPusUfsggdGu(Tgn)cc | 2440 | UGGAUUGUGCUC | 2763 |
| 1784447.1 | Afaggaacccsasa | | uugaGfcAfcaaucscsa | | AAGGAACCCAU | |
| AD- | uscsauacAfgCfCf | 2097 | VPusGfsgudCa(Tgn)ac | 2441 | ACUCAUACAGCC | 2764 |
| 1784448.1 | Afaguaugacscsa | | uuggCfuGfuaugasgsu | | AAGUAUGACCC | |
| AD- | usasaaauAfgUfCf | 2098 | VPusAfsuagAfaucauga | 2442 | GGUAAAAUAGUC | 2765 |
| 1784449.1 | Afugauucuasusa | | CfuAfuuuuascsc | | AUGAUUCUAUG | |
| AD- | usasaaauAfgUfCf | 2098 | VPusAfsuadGa(Agn)uc | 2443 | GGUAAAAUAGUC | 2765 |
| 1784450.1 | Afugauucuasusa | | augaCfuAfuuuuascsc | | AUGAUUCUAUG | |
| AD- | gsusgcucAfaGfGf | 2099 | VPusCfsugaUfggguucc | 2444 | UUGUGCUCAAGG | 2766 |
| 1784451.1 | Afacccaucasgsa | | UfuGfagcacsasa | | AACCCAUCAGC | |
| AD- | csgsaagaAfcUfGf | 2100 | VPusUfsgudCc(Agn)cc | 2445 | CCCGAAGAACUG | 2767 |
| 1784452.1 | Afugguggacsasa | | aucaGfuUfcuucgsgsg | | AUGGUGGACAA | |
| AD- | asasuaaaAfuGfUf | 2101 | VPusUfscudAg(Tgn)cu | 2446 | CUAAUAAAAUGU | 2768 |
| 1784453.1 | Gfaagacuagsasa | | ucacAfuUfuuauusasg | | GAAGACUAGAC | |
| AD- | gsgscuggUfuGfGf | 2102 | VPusAfsaacAfaagcacc | 2447 | GUGGCUGGUUGG | 2769 |
| 1784454.1 | Ufgcuuuguususa | | AfaCfcagccsasc | | UGCUUUGUUUA | |
| AD- | ususguucAfcAfGf | 2103 | VPusAfscccUfacaugcu | 2448 | CUUUGUUCACAG | 2770 |
| 1784455.1 | Cfauguagggsusa | | GfuGfaacaasasg | | CAUGUAGGGUG | |
| AD- | ususcaaaUfaAfGf | 2104 | VPusAfsugdGg(Agn)c | 2449 | CCUUCAAAUAAG | 2771 |
| 1784456.1 | Afuggucccasusa | | caucuUfaUfuugaasgsg | | AUGGUCCCAUA | |
| AD- | ususuaaaAfcAfUf | 2105 | VPusCfsuacUfuuccuau | 2450 | CUUUUAAAACAU | 2772 |
| 1784457.1 | Afggaaaguasgsa | | GfuUfuuaaasasg | | AGGAAAGUAGA | |
| AD- | ususguuuAfuGfGf | 2106 | VPusAfsaaaCfuacuacc | 2451 | CUUUGUUUAUGG | 2773 |
| 1784458.1 | Ufaguaguuususa | | AfuAfaacaasasg | | UAGUAGUUUUU | |
| AD- | ususguuuAfuGfGf | 2106 | VPusAfsaadAc(Tgn)ac | 2452 | CUUUGUUUAUGG | 2773 |
| 1784459.1 | Ufaguaguuususa | | uaccAfuAfaacaasasg | | UAGUAGUUUUU | |
| AD- | gscsuaguUfaAfGf | 2107 | VPusCfscugAfuuugccu | 2453 | GAGCUAGUUAAG | 2774 |
| 1784460.1 | Gfcaaaucagsgsa | | UfaAfcuagcsusc | | GCAAAUCAGGU | |
| AD- | gsusaaaaUfaGfUf | 2108 | VPusUfsagaAfucaugac | 2454 | AGGUAAAAUAGU | 2775 |
| 1784461.1 | Cfaugauucusasa | | UfaUfuuuacscsu | | CAUGAUUCUAU | |
| AD- | gsusaaaaUfaGfUf | 2108 | VPusUfsagdAa(Tgn)ca | 2455 | AGGUAAAAUAGU | 2775 |
| 1784462.1 | Cfaugauucusasa | | ugacUfaUfuuuacscsu | | CAUGAUUCUAU | |
| AD- | gsascuggCfcGfUf | 2109 | VPusAfsauaCfcuagaac | 2456 | UGGACUGGCCGU | 2776 |
| 1784463.1 | Ufcuagguaususa | | GfgCfcagucscsa | | UCUAGGUAUUU | |
| AD- | uscsagccAfcUfGf | 2110 | VPusGfsccdTg(Tgn)uc | 2457 | GCUCAGCCACUG | 2777 |
| 1784464.1 | Afagaacaggscsa | | uucaGfuGfgcugasgsc | | AAGAACAGGCA | |
| AD- | usgsgaauGfuGfUf | 2111 | VPusAfsaudCc(Agn)gg | 2458 | UCUGGAAUGUGU | 2778 |
| 1784465.1 | Gfaccuggaususa | | ucacAfcAfuuccasgsa | | GACCUGGAUUG | |
| AD- | uscsacagCfaUfGf | 2112 | VPusCfsaucAfcccuaca | 2459 | GUUCACAGCAUG | 2779 |
| 1784466.1 | Ufagggugausgsa | | UfgCfugugasasc | | UAGGGUGAUGA | |
| AD- | usascagcCfaAfGf | 2113 | VPusAfsagdGg(Tgn)ca | 2460 | CAUACAGCCAAG | 2780 |
| 1784467.1 | Ufaugacccususa | | uacuUfgGfcuguasusg | | UAUGACCCUUC | |
| AD- | csusgagcAfcUfGf | 2114 | VPusGfsuccUfuaugcca | 2461 | ACCUGAGCACUG | 2781 |
| 1784468.1 | Gfcauaaggascsa | | GfuGfcucagsgsu | | GCAUAAGGACU | |
| AD- | csusgagcAfcUfGf | 2114 | VPusGfsucdCu(Tgn)au | 2462 | ACCUGAGCACUG | 2781 |
| 1784469.1 | Gfcauaaggascsa | | gccaGfuGfcucagsgsu | | GCAUAAGGACU | |
| AD- | gscsucaaGfgAfAf | 2115 | VPusCfsgcdTg(Agn)ug | 2463 | GUGCUCAAGGAA | 2782 |
| 1784470.1 | Cfccaucagcsgsa | | gguuCfcUfugagcsasc | | CCCAUCAGCGU | |
| AD- | ususcuggAfaUfGf | 2116 | VPusCfscadGg(Tgn)ca | 2464 | UCUUCUGGAAUG | 2783 |
| 1784471.1 | Ufgugaccugsgsa | | cacaUfuCfcagaasgsa | | UGUGACCUGGA | |
| AD- | usasaauuGfaGfCf | 2117 | VPusGfsccuUfaacuagc | 2465 | GAUAAAUUGAGC | 2784 |
| 1784472.1 | Ufaguuaaggscsa | | UfcAfauuuasusc | | UAGUUAAGGCA | |
| AD- | usasuuuuUfuUfGf | 2118 | VPusUfsgcdCa(Agn)cc | 2466 | GGUAUUUUUUUG | 2785 |
| 1784473.1 | Afagguuggcsasa | | uucaAfaAfaaauascsc | | AAGGUUGGCAG | |
| AD- | usasauuaGfaGfUf | 2119 | VPusCfsuguAfucacaac | 2467 | UAUAAUUAGAGU | 2786 |
| 1784474.1 | Ufgugauacasgsa | | UfcUfaauuasusa | | UGUGAUACAGA | |
| AD- | usasauuaGfaGfUf | 2119 | VPusCfsugdTa(Tgn)ca | 2468 | UAUAAUUAGAGU | 2786 |
| 1784475.1 | Ufgugauacasgsa | | caacUfcUfaauuasusa | | UGUGAUACAGA | |
| AD- | usgsacucUfcAfGf | 2120 | VPusCfsugcUfuuguccu | 2469 | GAUGACUCUCAG | 2787 |
| 1784476.1 | Gfacaaagcasgsa | | GfaGfagucasusc | | GACAAAGCAGU | |
| AD- | usgsacucUfcAfGf | 2120 | VPusCfsugdCu(Tgn)ug | 2470 | GAUGACUCUCAG | 2787 |
| 1784477.1 | Gfacaaagcasgsa | | uccuGfaGfagucasusc | | GACAAAGCAGU | |
| AD- | csasuacaGfcCfAf | 2121 | VPusGfsggdTc(Agn)ua | 2471 | CUCAUACAGCCA | 2788 |
| 1784478.1 | Afguaugaccscsa | | cuugGfcUfguaugsasg | | AGUAUGACCCU | |
| AD- | gsusauuuUfuUfUf | 2122 | VPusGfsccaAfccuucaa | 2472 | AGGUAUUUUUUU | 2789 |
| 1784479.1 | Gfaagguuggscsa | | AfaAfaauacscsu | | GAAGGUUGGCA | |
| AD- | csascagcAfuGfUf | 2123 | VPusUfscadTc(Agn)cc | 2473 | UUCACAGCAUGU | 2790 |
| 1784480.1 | Afgggugaugsasa | | cuacAfuGfcugugsasa | | AGGGUGAUGAG | |
| AD- | usasuaauUfaGfAf | 2124 | VPusGfsuadTc(Agn)ca | 2474 | GUUAUAAUUAGA | 2791 |
| 1784481.1 | Gfuugugauascsa | | acucUfaAfuuauasasc | | GUUGUGAUACA | |
| AD- | gsasuuuuGfgGfAf | 2125 | VPusUfsgcdAc(Agn)gc | 2475 | GGGAUUUUGGGA | 2792 |
| 1784482.1 | Afagcugugcsasa | | uuucCfcAfaaaucscsc | | AAGCUGUGCAG | |
| AD- | usasaaacAfaAfGf | 2126 | VPusCfsacdTc(Tgn)ug | 2476 | AUUAAAACAAAG | 2793 |
| 1784483.1 | Gfgcaagagusgsa | | cccuUfuGfuuuuasasu | | GGCAAGAGUGC | |
| AD- | uscsaaggAfaCfCf | 2127 | VPusGfsacgCfugauggg | 2477 | GCUCAAGGAACC | 2794 |
| 1784484.1 | Cfaucagcguscsa | | UfuCfcuugasgsc | | CAUCAGCGUCA | |
| AD- | uscsaaggAfaCfCf | 2127 | VPusGfsacdGc(Tgn)ga | 2478 | GCUCAAGGAACC | 2794 |
| 1784485.1 | Cfaucagcguscsa | | ugggUfuCfcuugasgsc | | CAUCAGCGUCA | |
| AD- | uscsagaaAfgUfUf | 2128 | VPusGfscacAfucaacaa | 2479 | CUUCAGAAAGUU | 2795 |
| 1784486.1 | Gfuugaugugscsa | | CfuUfucugasasg | | GUUGAUGUGCU | |
| AD- | uscsagaaAfgUfUf | 2128 | VPusGfscadCa(Tgn)ca | 2480 | CUUCAGAAAGUU | 2795 |
| 1784487.1 | Gfuugaugugscsa | | acaaCfuUfucugasasg | | GUUGAUGUGCU | |
| AD- | cscsaaauAfaUfGf | 2129 | VPusCfsccgAfagauuca | 2481 | AUCCAAAUAAUG | 2796 |
| 1784488.1 | Afaucuucggsgsa | | UfuAfuuuggsasu | | AAUCUUCGGGU | |
| AD- | asgscaugUfaGfGf | 2130 | VPusUfsgcdTc(Agn)uc | 2482 | ACAGCAUGUAGG | 2797 |
| 1784489.1 | Gfugaugagcsasa | | acccUfaCfaugcusgsu | | GUGAUGAGCAC | |
| AD- | gsasuaaaUfuGfAf | 2131 | VPusCfsuuaAfcuagcuc | 2483 | AAGAUAAAUUGA | 2798 |
| 1784490.1 | Gfcuaguuaasgsa | | AfaUfuuaucsusu | | GCUAGUUAAGG | |
| AD- | csuscagcCfaCfUf | 2132 | VPusCfscugUfucuucag | 2484 | AGCUCAGCCACU | 2799 |
| 1784491.1 | Gfaagaacagsgsa | | UfgGfcugagscsu | | GAAGAACAGGC | |
| AD- | csuscagcCfaCfUf | 2132 | VPusCfscudGu(Tgn)cu | 2485 | AGCUCAGCCACU | 2799 |
| 1784492.1 | Gfaagaacagsgsa | | ucagUfgGfcugagscsu | | GAAGAACAGGC | |
| AD- | csasgcauGfuAfGf | 2133 | VPusGfscudCa(Tgn)ca | 2486 | CACAGCAUGUAG | 2800 |
| 1784493.1 | Gfgugaugagscsa | | cccuAfcAfugcugsusg | | GGUGAUGAGCA | |
| AD- | asusaaugAfaUfCf | 2134 | VPusAfsacaCfccgaaga | 2487 | AAAUAAUGAAUC | 2801 |
| 1784494.1 | Ufucgggugususa | | UfuCfauuaususu | | UUCGGGUGUUU | |
| AD- | gsgsaaccCfaUfCf | 2135 | VPusUfsgcdTg(Agn)cg | 2488 | AAGGAACCCAUC | 2802 |
| 1784495.1 | Afgcgucagcsasa | | cugaUfcGfguuccsusu | | AGCGUCAGCAG | |
| AD- | usgsuucaCfaGfCf | 2136 | VPusCfsaccCfuacaugc | 2489 | UUUGUUCACAGC | 2803 |
| 1784496.1 | Afuguagggusgsa | | UfgUfgaacasasa | | AUGUAGGGUGA | |
| AD- | asasacaaAfgGfGf | 2137 | VPusAfsgcdAc(Tgn)cu | 2490 | UAAAACAAAGGG | 2804 |
| 1784497.1 | Cfaagagugcsusa | | ugccCfuUfuguuususa | | CAAGAGUGCUG | |
| AD- | usgsugugAfcCfUf | 2138 | VPusAfsgcaCfaauccag | 2491 | AAUGUGUGACCU | 2805 |
| 1784498.1 | Gfgauugugcsusa | | GfuCfacacasusu | | GGAUUGUGCUC | |
| AD- | usgsugugAfcCfUf | 2138 | VPusAfsgcdAc(Agn)au | 2492 | AAUGUGUGACCU | 2805 |
| 1784499.1 | Gfgauugugcsusa | | ccagGfuCfacacasusu | | GGAUUGUGCUC | |
| AD- | asasuaauGfaAfUf | 2139 | VPusAfscacCfcgaagau | 2493 | CAAAUAAUGAAU | 2806 |
| 1784500.1 | Cfuucgggugsusa | | UfcAfuuauususg | | CUUCGGGUGUU | |
| AD- | asusuuuuUfuGfAf | 2140 | VPusCfsugcCfaaccuuc | 2494 | GUAUUUUUUUGA | 2807 |
| 1784501.1 | Afgguuggcasgsa | | AfaAfaaaausasc | | AGGUUGGCAGC | |
| AD- | asusuuuuUfuGfAf | 2140 | VPusCfsugdCc(Agn)ac | 2495 | GUAUUUUUUUGA | 2807 |
| 1784502.1 | Afgguuggcasgsa | | cuucAfaAfaaaausasc | | AGGUUGGCAGC | |
| AD- | usgscucaAfgGfAf | 2141 | VPusGfscudGa(Tgn)gg | 2496 | UGUGCUCAAGGA | 2808 |
| 1784503.1 | Afcccaucagscsa | | guucCfuUfgagcascsa | | ACCCAUCAGCG | |
| AD- | usasaugaAfuCfUf | 2142 | VPusAfsaacAfcccgaag | 2497 | AAUAAUGAAUCU | 2809 |
| 1784504.1 | Ufcggguguususa | | AfuUfcauuasusu | | UCGGGUGUUUC | |
| AD- | gsusggcuGfgUfUf | 2143 | VPusAfscaaAfgcaccaa | 2498 | CUGUGGCUGGUU | 2810 |
| 1784505.1 | Gfgugcuuugsusa | | CfcAfgccacsasg | | GGUGCUUUGUU | |
| AD- | asasggaaCfcCfAf | 2144 | VPusCfsugaCfgcugaug | 2499 | UCAAGGAACCCA | 2811 |
| 1784506.1 | Ufcagcgucasgsa | | GfgUfuccuusgsa | | UCAGCGUCAGC | |
| AD- | ususaaaaCfaAfAf | 2145 | VPusAfscudCu(Tgn)gc | 2500 | CAUUAAAACAAA | 2812 |
| 1784507.1 | Gfggcaagagsusa | | ccuuUfgUfuuuaasusg | | GGGCAAGAGUG | |
| AD- | csusguggCfuGfGf | 2146 | VPusAfsaadGc(Agn)cc | 2501 | UGCUGUGGCUGG | 2813 |
| 1784508.1 | Ufuggugcuususa | | aaccAfgCfcacagscsa | | UUGGUGCUUUG | |
| AD- | csasgcucAfgCfCf | 2147 | VPusGfsuudCu(Tgn)ca | 2502 | CCCAGCUCAGCC | 2814 |
| 1784509.1 | Afcugaagaascsa | | guggCfuGfagcugsgsg | | ACUGAAGAACA | |
| AD- | asasauaaUfgAfAf | 2148 | VPusCfsaccCfgaagauu | 2503 | CCAAAUAAUGAA | 2815 |
| 1784510.1 | Ufcuucgggusgsa | | CfaUfuauuusgsg | | UCUUCGGGUGU | |
| AD- | gsasauguGfuGfAf | 2149 | VPusAfscaaUfccagguc | 2504 | UGGAAUGUGUGA | 2816 |
| 1784511.1 | Cfcuggauugsusa | | AfcAfcauucscsa | | CCUGGAUUGUG | |
| AD- | csasuguaGfgGfUf | 2150 | VPusAfsgudGc(Tgn)ca | 2505 | AGCAUGUAGGGU | 2817 |
| 1784512.1 | Gfaugagcacsusa | | ucacCfcUfacaugscsu | | GAUGAGCACUC | |
| AD- | gsgsacugGfcCfGf | 2151 | VPusAfsuadCc(Tgn)ag | 2506 | AUGGACUGGOCG | 2818 |
| 1784513.1 | Ufucuagguasusa | | aacgGfcCfaguccsasu | | UUCUAGGUAUU | |
| AD- | asusaaauUfgAfGf | 2152 | VPusCfscuuAfacuagcu | 2507 | AGAUAAAUUGAG | 2819 |
| 1784514.1 | Cfuaguuaagsgsa | | CfaAfuuuauscsu | | CUAGUUAAGGC | |
| AD- | gsasaaguUfgUfUf | 2153 | VPusCfscagCfacaucaa | 2508 | CAGAAAGUUGUU | 2820 |
| 1784515.1 | Gfaugugcugsgsa | | CfaAfcuuucsusg | | GAUGUGCUGGA | |
| AD- | gsasaaguUfgUfUf | 2153 | VPusCfscadGc(Agn)ca | 2509 | CAGAAAGUUGUU | 2820 |
| 1784516.1 | Gfaugugcugsgsa | | ucaaCfaAfcuuucsusg | | GAUGUGCUGGA | |
| AD- | asascaaaGfgGfCf | 2154 | VPusCfsagcAfcucuugc | 2510 | AAAACAAAGGGC | 2821 |
| 1784517.1 | Afagagugcusgsa | | CfcUfuuguususu | | AAGAGUGCUGA | |
| AD- | cscsugagCfaCfUf | 2155 | VPusUfsccdTu(Agn)ug | 2511 | GACCUGAGCACU | 2822 |
| 1784518.1 | Gfgcauaaggsasa | | ccagUfgCfucaggsusc | | GGCAUAAGGAC | |
| AD- | usgsauggUfgGfAf | 2156 | VPusGfscgdCc(Agn)gu | 2512 | ACUGAUGGUGGA | 2823 |
| 1784519.1 | Cfaacuggcgscsa | | ugucCfaCfcaucasgsu | | CAACUGGOGCC | |
| AD- | ascsaaagGfgCfAf | 2157 | VPusUfscadGc(Agn)cu | 2513 | AAACAAAGGGCA | 2824 |
| 1784520.1 | Afgagugcugsasa | | cuugCfcCfuuugususu | | AGAGUGCUGAC | |
| AD- | ascsggacCfuGfAf | 2158 | VPusAfsugdCc(Agn)g | 2514 | CAACGGACCUGA | 2825 |
| 1784521.1 | Gfcacuggcasusa | | ugcucAfgGfuccgususg | | GCACUGGCAUA | |
| AD- | usgsggaaAfgCfUf | 2159 | VPusGfsuudGc(Tgn)gc | 2515 | UUUGGGAAAGCU | 2826 |
| 1784522.1 | Gfugcagcaascsa | | acagCfuUfucccasasa | | GUGCAGCAACC | |
| AD- | asascccaUfcAfGf | 2160 | VPusGfscudGc(Tgn)ga | 2516 | GGAACCCAUCAG | 2827 |
| 1784523.1 | Cfgucagcagscsa | | cgcuGfaUfggguuscsc | | CGUCAGCAGCG | |
| AD- | asgscucaGfcCfAf | 2161 | VPusUfsgudTc(Tgn)uc | 2517 | CCAGCUCAGCCA | 2828 |
| 1784524.1 | Cfugaagaacsasa | | agugGfcUfgagcusgsg | | CUGAAGAACAG | |
| AD- | ususuugaAfgGfUf | 2162 | VPusAfsgcdGc(Tgn)gc | 2518 | UUUUUUGAAGGU | 2829 |
| 1784525.1 | Ufggcagcgcsusa | | caacCfuUfcaaaasasa | | UGGCAGCGCUA | |
| AD- | gsusaugaCfcCfUf | 2163 | VPusGfscudTc(Agn)gg | 2519 | AAGUAUGACCCU | 2830 |
| 1784526.1 | Ufcccugaagscsa | | gaagGfgUfcauacsusu | | UCCCUGAAGCC | |
| AD- | csusacccAfgGfCf | 2164 | VPusUfsggdTc(Agn)gu | 2520 | ACCUACCCAGGC | 2831 |
| 1784527.1 | Ufcacugaccsasa | | gagcCfuGfgguagsgsu | | UCACUGACCAC | |
| AD- | ascsccagGfcUfCf | 2165 | VPusGfsgudGg(Tgn)ca | 2521 | CUACCCAGGCUC | 2832 |
| 1784528.1 | Afcugaccacscsa | | gugaGfcCfugggusasg | | ACUGACCACCC | |
| AD- | asusggacUfgGfCf | 2166 | VPusAfsccuAfgaacggc | 2522 | UGAUGGACUGGC | 2833 |
| 1784529.1 | Cfguucuaggsusa | | CfaGfuccauscsa | | CGUUCUAGGUA | |
| AD | ascscugaGfcAfCf | 2167 | VPusCfscuuAfugccagu | 2523 | GGACCUGAGCAC | 2834 |
| 1784530.1 | Ufggcauaagsgsa | | GfcUfcagguscsc | | UGGCAUAAGGA | |
| AD- | cscsaucaGfcGfUf | 2168 | VPusCfsucgCfugcugac | 2524 | ACCCAUCAGOGU | 2835 |
| 1784531.1 | Cfagcagcgasgsa | | GfcUfgauggsgsu | | CAGCAGCGAGC | |
| AD- | usgsgacuGfgCfCf | 2169 | VPusUfsacdCu(Agn)ga | 2525 | GAUGGACUGGCC | 2836 |
| 1784532.1 | Gfuucuaggusasa | | acggCfcAfguccasusc | | GUUCUAGGUAU | |
| AD- | ususuuggGfaAfAf | 2170 | VPusGfscudGc(Agn)ca | 2526 | GAUUUUGGGAAA | 2837 |
| 1784533.1 | Gfcugugcagscsa | | gcuuUfcCfcaaaasusc | | GCUGUGCAGCA | |
| AD- | csusgaugGfaCfUf | 2171 | VPusUfsagaAfcggccag | 2527 | ACCUGAUGGACU | 2838 |
| 1784534.1 | Gfgccguucusasa | | UfcCfaucagsgsu | | GGCCGUUCUAG | |
| AD- | ascscuacCfcAfGf | 2172 | VPusGfsucdAg(Tgn)ga | 2528 | GGACCUACCCAG | 2839 |
| 1784535.1 | Gfcucacugascsa | | gccuGfgGfuagguscsc | | GCUCACUGACC | |
| AD- | gsgsaccuAfcCfCf | 2173 | VPusCfsagdTg(Agn)gc | 2529 | CUGGACCUACCC | 2840 |
| 1784536.1 | Afggcucacusgsa | | cuggGfuAfgguccsasg | | AGGCUCACUGA | |
| AD- | gsasuggaCfuGfGf | 2174 | VPusCfscuaGfaacggcc | 2530 | CUGAUGGACUGG | 2841 |
| 1784537.1 | Cfcguucuagsgsa | | AfgUfccaucsasg | | CCGUUCUAGGU | |
| AD- | asasgguuGfgCfAf | 2175 | VPusGfsgudTu(Agn)gc | 2531 | UGAAGGUUGGCA | 2842 |
| 1784538.1 | Gfcgcuaaacscsa | | gcugCfcAfaccuuscsa | | GCGCUAAACCG | |
| AD- | usgsauggAfcUfGf | 2176 | VPusCfsuagAfacggcca | 2532 | CCUGAUGGACUG | 2843 |
| 1784539.1 | Gfccguucuasgsa | | GfuCfcaucasgsg | | GCCGUUCUAGG | |
| AD- | asascugaUfgGfUf | 2177 | VPusCfscagUfuguccac | 2533 | AGAACUGAUGGU | 2844 |
| 1784540.1 | Gfgacaacugsgsa | | CfaUfcaguuscsu | | GGACAACUGGC | |
| AD- | asascugaUfgGfUf | 2177 | VPusCfscadGu(Tgn)gu | 2534 | AGAACUGAUGGU | 2844 |
| 1784541.1 | Gfgacaacugsgsa | | ccacCfaUfcaguuscsu | | GGACAACUGGC | |
| AD- | ascsaacuGfcUfGf | 2178 | VPusCfsaacCfagccaca | 2535 | ACACAACUGCUG | 2845 |
| 1784542.1 | Ufggcugguusgsa | | GfcAfguugusgsu | | UGGCUGGUUGG | |
| AD- | ascsaacuGfcUfGf | 2178 | VPusCfsaadCc(Agn)gc | 2536 | ACACAACUGCUG | 2845 |
| 1784543.1 | Ufggcugguusgsa | | cacaGfcAfguugusgsu | | UGGCUGGUUGG | |
| AD- | csasacggAfcCfUf | 2179 | VPusGfsccdAg(Tgn)gc | 2537 | CACAACGGACCU | 2846 |
| 1784544.1 | Gfagcacuggscsa | | ucagGfuCfcguugsusg | | GAGCACUGGCA | |
| AD- | csasacugCfuGfUf | 2180 | VPusCfscaaCfcagccac | 2538 | CACAACUGCUGU | 2847 |
| 1784545.1 | Gfgcugguugsgsa | | AfgCfaguugsusg | | GGCUGGUUGGU | |
| AD- | ascsugauGfgUfGf | 2181 | VPusGfsccdAg(Tgn)ug | 2539 | GAACUGAUGGUG | 2848 |
| 1784546.1 | Gfacaacuggscsa | | uccaCfcAfucagususc | | GACAACUGGCG | |
| AD- | csusgcugUfgGfCf | 2182 | VPusGfscacCfaaccagc | 2540 | AACUGCUGUGGC | 2849 |
| 1784547.1 | Ufgguuggugscsa | | CfaCfagcagsusu | | UGGUUGGUGCU | |

TABLE 9
Unmodified Sense and Antisense Strand Sequences of CA2 dsRNA Agents for C16
Modification

| | | | Range in | | | Range in |
|---|---|---|---|---|---|---|
| Duplex | Sense Sequence | SEQ ID | NM_ | Antisense Sequence | SEQ ID | NM_ |
| Name | 5′ to 3′ | NO: | 000067.3 | 5′ to 3′ | NO: | 000067.3 |
| AD- | ACCUGAGCACUG | 2850 | 111-131 | ACCUUAUGCCAGU | 3210 | 109-131 |
| 1962343 | GCAUAAGGU | | | GCUCAGGUCC | | |
| AD- | CUGAGCACUGGC | 2851 | 113-133 | AGUCCUUAUGCCA | 3211 | 111-133 |
| 1962345 | AUAAGGACU | | | GUGCUCAGGU | | |
| AD- | UGACAUCGACAC | 2852 | 168-188 | ACUGUAUGAGUGU | 3212 | 166-188 |
| 1962360 | UCAUACAGU | | | CGAUGUCAAC | | |
| AD- | CACUCAUACAGC | 2853 | 177-197 | ACAUACUUGGCUG | 3213 | 175-197 |
| 1962369 | CAAGUAUGU | | | UAUGAGUGUC | | |
| AD- | ACUCAUACAGCC | 2854 | 178-198 | AUCAUACUUGGCU | 3214 | 176-198 |
| 1962370 | AAGUAUGAU | | | GUAUGAGUGU | | |
| AD- | CUCAUACAGCCA | 2855 | 179-199 | AGUCAUACUUGGC | 3215 | 177-199 |
| 1962371 | AGUAUGACU | | | UGUAUGAGUG | | |
| AD- | CCAAGUAUGACC | 2856 | 188-208 | ACAGGGAAGGGUC | 3216 | 186-208 |
| 1962380 | CUUCCCUGU | | | AUACUUGGCU | | |
| AD- | CUGAGGAUCCUC | 2857 | 244-264 | ACCAUUGUUGAGG | 3217 | 242-264 |
| 1962416 | AACAAUGGU | | | AUCCUCAGGG | | |
| AD- | UGAGGAUCCUCA | 2858 | 245-265 | AACCAUUGUUGAG | 3218 | 243-265 |
| 1962417 | ACAAUGGUU | | | GAUCCUCAGG | | |
| AD- | GAGGAUCCUCAA | 2859 | 246-266 | AGACCAUUGUUGA | 3219 | 244-266 |
| 1962418 | CAAUGGUCU | | | GGAUCCUCAG | | |
| AD- | UGCUUUCAACGU | 2860 | 267-287 | ACAAACUCCACGU | 3220 | 265-287 |
| 1962439 | GGAGUUUGU | | | UGAAAGCAUG | | |
| AD- | GCUUUCAACGUG | 2861 | 268-288 | AUCAAACUCCACG | 3221 | 266-288 |
| 1962440 | GAGUUUGAU | | | UUGAAAGCAU | | |
| AD- | CUUUCAACGUGG | 2862 | 269-289 | AAUCAAACUCCAC | 3222 | 267-289 |
| 1962441 | AGUUUGAUU | | | GUUGAAAGCA | | |
| AD- | UUUCAACGUGGA | 2863 | 270-290 | ACAUCAAACUCCA | 3223 | 268-290 |
| 1962442 | GUUUGAUGU | | | CGUUGAAAGC | | |
| AD- | GGAGUUUGAUGA | 2864 | 279-299 | ACCUGAGAGUCAU | 3224 | 277-299 |
| 1962451 | CUCUCAGGU | | | CAAACUCCAC | | |
| AD- | UGACUCUCAGGA | 2865 | 288-308 | ACUGCUUUGUCCU | 3225 | 286-308 |
| 1962460 | CAAAGCAGU | | | GAGAGUCAUC | | |
| AD- | AACUUCACUUGG | 2866 | 425-445 | ACCAGUGAACCAA | 3226 | 423-445 |
| 1962557 | UUCACUGGU | | | GUGAAGUUCU | | |
| AD- | CUGAUGGACUGG | 2867 | 485-505 | AUAGAACGGCCAG | 3227 | 483-505 |
| 1962597 | CCGUUCUAU | | | UCCAUCAGGU | | |
| AD- | UGAUGGACUGGC | 2868 | 486-506 | ACUAGAACGGCCA | 3228 | 484-506 |
| 1962598 | CGUUCUAGU | | | GUCCAUCAGG | | |
| AD- | GAUGGACUGGCC | 2869 | 487-507 | ACCUAGAACGGCC | 3229 | 485-507 |
| 1962599 | GUUCUAGGU | | | AGUCCAUCAG | | |
| AD- | AUGGACUGGCCG | 2870 | 488-508 | AACCUAGAACGGC | 3230 | 486-508 |
| 1962600 | UUCUAGGUU | | | CAGUCCAUCA | | |
| AD- | GACUGGCCGUUC | 2871 | 491-511 | AAAUACCUAGAAC | 3231 | 489-511 |
| 1962603 | UAGGUAUUU | | | GGCCAGUCCA | | |
| AD- | ACUGGCCGUUCU | 2872 | 492-512 | AAAAUACCUAGAA | 3232 | 490-512 |
| 1962604 | AGGUAUUUU | | | CGGCCAGUCC | | |
| AD- | CUGGCCGUUCUA | 2873 | 493-513 | AAAAAUACCUAGA | 3233 | 491-513 |
| 1962605 | GGUAUUUUU | | | ACGGCCAGUC | | |
| AD- | UGGCCGUUCUAG | 2874 | 494-514 | AAAAAAUACCUAG | 3234 | 492-514 |
| 1962606 | GUAUUUUUU | | | AACGGCCAGU | | |
| AD- | GGCCGUUCUAGG | 2875 | 495-515 | AAAAAAAUACCUA | 3235 | 493-515 |
| 1962607 | UAUUUUUUU | | | GAACGGCCAG | | |
| AD- | GCCGUUCUAGGU | 2876 | 496-516 | AAAAAAAAUACCU | 3236 | 494-516 |
| 1962608 | AUUUUUUUU | | | AGAACGGCCA | | |
| AD- | CCGUUCUAGGUA | 2877 | 497-517 | ACAAAAAAAUACC | 3237 | 495-517 |
| 1962609 | UUUUUUUGU | | | UAGAACGGCC | | |
| AD- | CGUUCUAGGUAU | 2878 | 498-518 | AUCAAAAAAAUAC | 3238 | 496-518 |
| 1962610 | UUUUUUGAU | | | CUAGAACGGC | | |
| AD- | GUUCUAGGUAUU | 2879 | 499-519 | AUUCAAAAAAAUA | 3239 | 497-519 |
| 1962611 | UUUUUGAAU | | | CCUAGAACGG | | |
| AD- | UUCUAGGUAUUU | 2880 | 500-520 | ACUUCAAAAAAAU | 3240 | 498-520 |
| 1962612 | UUUUGAAGU | | | ACCUAGAACG | | |
| AD- | UCUAGGUAUUUU | 2881 | 501-521 | ACCUUCAAAAAAA | 3241 | 499-521 |
| 1962613 | UUUGAAGGU | | | UACCUAGAAC | | |
| AD- | UAGGUAUUUUUU | 2882 | 503-523 | AAACCUUCAAAAA | 3242 | 501-523 |
| 1962615 | UGAAGGUUU | | | AAUACCUAGA | | |
| AD- | AGGUAUUUUUUU | 2883 | 504-524 | ACAACCUUCAAAA | 3243 | 502-524 |
| 1962616 | GAAGGUUGU | | | AAAUACCUAG | | |
| AD- | GGUAUUUUUUUG | 2884 | 505-525 | ACCAACCUUCAAA | 3244 | 503-525 |
| 1962617 | AAGGUUGGU | | | AAAAUACCUA | | |
| AD- | GUAUUUUUUUGA | 2885 | 506-526 | AGCCAACCUUCAA | 3245 | 504-526 |
| 1962618 | AGGUUGGCU | | | AAAAAUACCU | | |
| AD- | AUUUUUUUGAAG | 2886 | 508-528 | ACUGCCAACCUUC | 3246 | 506-528 |
| 1962620 | GUUGGCAGU | | | AAAAAAAUAC | | |
| AD- | CGGGCCUUCAGA | 2887 | 536-556 | AAACAACUUUCUG | 3247 | 534-556 |
| 1962648 | AAGUUGUUU | | | AAGGCCCGGU | | |
| AD- | GGGCCUUCAGAA | 2888 | 537-557 | ACAACAACUUUCU | 3248 | 535-557 |
| 1962649 | AGUUGUUGU | | | GAAGGCCCGG | | |
| AD- | GGCCUUCAGAAA | 2889 | 538-558 | AUCAACAACUUUC | 3249 | 536-558 |
| 1962650 | GUUGUUGAU | | | UGAAGGCCCG | | |
| AD- | CCUUCAGAAAGU | 2890 | 540-560 | ACAUCAACAACUU | 3250 | 538-560 |
| 1962652 | UGUUGAUGU | | | UCUGAAGGCC | | |
| AD- | CUUCAGAAAGUU | 2891 | 541-561 | AACAUCAACAACU | 3251 | 539-561 |
| 1962653 | GUUGAUGUU | | | UUCUGAAGGC | | |
| AD- | UCAGAAAGUUGU | 2892 | 543-563 | AGCACAUCAACAA | 3252 | 541-563 |
| 1962655 | UGAUGUGCU | | | CUUUCUGAAG | | |
| AD- | GAAAGUUGUUGA | 2893 | 546-566 | ACCAGCACAUCAA | 3253 | 544-566 |
| 1962658 | UGUGCUGGU | | | CAACUUUCUG | | |
| AD- | AUUCCAUUAAAA | 2894 | 566-586 | AGCCCUUUGUUUU | 3254 | 564-586 |
| 1962678 | CAAAGGGCU | | | AAUGGAAUCC | | |
| AD- | AACAAAGGGCAA | 2895 | 576-596 | ACAGCACUCUUGC | 3255 | 574-596 |
| 1962688 | GAGUGCUGU | | | CCUUUGUUUU | | |
| AD- | AGUGCUGACUUC | 2896 | 589-609 | AAAGUUAGUGAAG | 3256 | 587-609 |
| 1962701 | ACUAACUUU | | | UCAGCACUCU | | |
| AD- | UGCUGACUUCAC | 2897 | 591-611 | ACGAAGUUAGUGA | 3257 | 589-611 |
| 1962703 | UAACUUCGU | | | AGUCAGCACU | | |
| AD- | CUGACUUCACUA | 2898 | 593-613 | AAUCGAAGUUAGU | 3258 | 591-613 |
| 1962705 | ACUUCGAUU | | | GAAGUCAGCA | | |
| AD- | UGACUUCACUAA | 2899 | 594-614 | AGAUCGAAGUUAG | 3259 | 592-614 |
| 1962706 | CUUCGAUCU | | | UGAAGUCAGC | | |
| AD- | GACUUCACUAAC | 2900 | 595-615 | AGGAUCGAAGUUA | 3260 | 593-615 |
| 1962707 | UUCGAUCCU | | | GUGAAGUCAG | | |
| AD- | CACUAACUUCGA | 2901 | 600-620 | ACACGAGGAUCGA | 3261 | 598-620 |
| 1962712 | UCCUCGUGU | | | AGUUAGUGAA | | |
| AD- | ACUAACUUCGAU | 2902 | 601-621 | ACCACGAGGAUCG | 3262 | 599-621 |
| 1962713 | CCUCGUGGU | | | AAGUUAGUGA | | |
| AD- | CCUCCUUCCUGA | 2903 | 621-641 | ACCAAGGAUUCAG | 3263 | 619-641 |
| 1962733 | AUCCUUGGU | | | GAAGGAGGCC | | |
| AD- | UCCUUCCUGAAU | 2904 | 623-643 | AAUCCAAGGAUUC | 3264 | 621-643 |
| 1962735 | CCUUGGAUU | | | AGGAAGGAGG | | |
| AD- | CCUUCCUGAAUC | 2905 | 624-644 | AAAUCCAAGGAUU | 3265 | 622-644 |
| 1962736 | CUUGGAUUU | | | CAGGAAGGAG | | |
| AD- | CUCCUCUUCUGG | 2906 | 674-694 | ACACACAUUCCAG | 3266 | 672-694 |
| 1962766 | AAUGUGUGU | | | AAGAGGAGGG | | |
| AD- | GAAUGUGUGACC | 2907 | 685-705 | AACAAUCCAGGUC | 3267 | 683-705 |
| 1962777 | UGGAUUGUU | | | ACACAUUCCA | | |
| AD- | UGUGUGACCUGG | 2908 | 688-708 | AAGCACAAUCCAG | 3268 | 686-708 |
| 1962780 | AUUGUGCUU | | | GUCACACAUU | | |
| AD- | GUGCUCAAGGAA | 2909 | 703-723 | ACUGAUGGGUUCC | 3269 | 701-723 |
| 1962795 | CCCAUCAGU | | | UUGAGCACAA | | |
| AD- | UCAAGGAACCCA | 2910 | 707-727 | AGACGCUGAUGGG | 3270 | 705-727 |
| 1962799 | UCAGCGUCU | | | UUCCUUGAGC | | |
| AD- | AAGGAACCCAUC | 2911 | 709-729 | ACUGACGCUGAUG | 3271 | 707-729 |
| 1962801 | AGCGUCAGU | | | GGUUCCUUGA | | |
| AD- | CCAUCAGCGUCA | 2912 | 716-736 | ACUCGCUGCUGAC | 3272 | 714-736 |
| 1962808 | GCAGCGAGU | | | GCUGAUGGGU | | |
| AD- | GAAAUUCCGUAA | 2913 | 744-764 | AAGUUAAGUUUAC | 3273 | 742-764 |
| 1962836 | ACUUAACUU | | | GGAAUUUCAA | | |
| AD- | AAAUUCCGUAAA | 2914 | 745-765 | AAAGUUAAGUUUA | 3274 | 743-765 |
| 1962837 | CUUAACUUU | | | CGGAAUUUCA | | |
| AD- | CCGUAAACUUAA | 2915 | 750-770 | ACAUUGAAGUUAA | 3275 | 748-770 |
| 1962842 | CUUCAAUGU | | | GUUUACGGAA | | |
| AD- | CGUAAACUUAAC | 2916 | 751-771 | ACCAUUGAAGUUA | 3276 | 749-771 |
| 1962843 | UUCAAUGGU | | | AGUUUACGGA | | |
| AD- | AACUGAUGGUGG | 2917 | 788-808 | ACCAGUUGUCCAC | 3277 | 786-808 |
| 1962860 | ACAACUGGU | | | CAUCAGUUCU | | |
| AD- | CUCAGCCACUGA | 2918 | 815-835 | ACCUGUUCUUCAG | 3278 | 813-835 |
| 1962885 | AGAACAGGU | | | UGGCUGAGCU | | |
| AD- | AGAACAGGCAAA | 2919 | 827-847 | AAGCUUUGAUUUG | 3279 | 825-847 |
| 1962897 | UCAAAGCUU | | | CCUGUUCUUC | | |
| AD- | AGGCAAAUCAAA | 2920 | 832-852 | AAAGGAAGCUUUG | 3280 | 830-852 |
| 1962902 | GCUUCCUUU | | | AUUUGCCUGU | | |
| AD- | CAAAGCUUCCUU | 2921 | 840-860 | ACUUAUUUGAAGG | 3281 | 838-860 |
| 1962910 | CAAAUAAGU | | | AAGCUUUGAU | | |
| AD- | AAAGCUUCCUUC | 2922 | 841-861 | AUCUUAUUUGAAG | 3282 | 839-861 |
| 1962911 | AAAUAAGAU | | | GAAGCUUUGA | | |
| AD- | AAGCUUCCUUCA | 2923 | 842-862 | AAUCUUAUUUGAA | 3283 | 840-862 |
| 1962912 | AAUAAGAUU | | | GGAAGCUUUG | | |
| AD- | AGCUUCCUUCAA | 2924 | 843-863 | ACAUCUUAUUUGA | 3284 | 841-863 |
| 1962913 | AUAAGAUGU | | | AGGAAGCUUU | | |
| AD- | GCUUCCUUCAAA | 2925 | 844-864 | ACCAUCUUAUUUG | 3285 | 842-864 |
| 1962914 | UAAGAUGGU | | | AAGGAAGCUU | | |
| AD- | GUCUGUAUCCAA | 2926 | 871-891 | AUUCAUUAUUUGG | 3286 | 869-891 |
| 1962941 | AUAAUGAAU | | | AUACAGACUA | | |
| AD- | GUAUCCAAAUAA | 2927 | 875-895 | AAAGAUUCAUUAU | 3287 | 873-895 |
| 1962945 | UGAAUCUUU | | | UUGGAUACAG | | |
| AD- | AUCCAAAUAAUG | 2928 | 877-897 | ACGAAGAUUCAUU | 3288 | 875-897 |
| 1962947 | AAUCUUCGU | | | AUUUGGAUAC | | |
| AD- | UCCAAAUAAUGA | 2929 | 878-898 | ACCGAAGAUUCAU | 3289 | 876-898 |
| 1962948 | AUCUUCGGU | | | UAUUUGGAUA | | |
| AD- | CCAAAUAAUGAA | 2930 | 879-899 | ACCCGAAGAUUCA | 3290 | 877-899 |
| 1962949 | UCUUCGGGU | | | UUAUUUGGAU | | |
| AD- | CAAAUAAUGAAU | 2931 | 880-900 | AACCCGAAGAUUC | 3291 | 878-900 |
| 1962950 | CUUCGGGUU | | | AUUAUUUGGA | | |
| AD- | AAAUAAUGAAUC | 2932 | 881-901 | ACACCCGAAGAUU | 3292 | 879-901 |
| 1962951 | UUCGGGUGU | | | CAUUAUUUGG | | |
| AD- | AAUAAUGAAUCU | 2933 | 882-902 | AACACCCGAAGAU | 3293 | 880-902 |
| 1962952 | UCGGGUGUU | | | UCAUUAUUUG | | |
| AD- | AUAAUGAAUCUU | 2934 | 883-903 | AAACACCCGAAGA | 3294 | 881-903 |
| 1962953 | CGGGUGUUU | | | UUCAUUAUUU | | |
| AD- | UAAUGAAUCUUC | 2935 | 884-904 | AAAACACCCGAAG | 3295 | 882-904 |
| 1962954 | GGGUGUUUU | | | AUUCAUUAUU | | |
| AD- | UGAAUCUUCGGG | 2936 | 887-907 | AGGGAAACACCCG | 3296 | 885-907 |
| 1962957 | UGUUUCCCU | | | AAGAUUCAUU | | |
| AD- | GAAUCUUCGGGU | 2937 | 888-908 | AAGGGAAACACCC | 3297 | 886-908 |
| 1962958 | GUUUCCCUU | | | GAAGAUUCAU | | |
| AD- | AAGCACAGAUCU | 2938 | 914-934 | AACCAAGGUAGAU | 3298 | 912-934 |
| 1962984 | ACCUUGGUU | | | CUGUGCUUAG | | |
| AD- | AGCACAGAUCUA | 2939 | 915-935 | ACACCAAGGUAGA | 3299 | 913-935 |
| 1962985 | CCUUGGUGU | | | UCUGUGCUUA | | |
| AD- | GCACAGAUCUAC | 2940 | 916-936 | AUCACCAAGGUAG | 3300 | 914-936 |
| 1962986 | CUUGGUGAU | | | AUCUGUGCUU | | |
| AD- | AGAUCUACCUUG | 2941 | 920-940 | ACAAAUCACCAAG | 3301 | 918-940 |
| 1962990 | GUGAUUUGU | | | GUAGAUCUGU | | |
| AD- | ACAACUGCUGUG | 2942 | 1039- | ACAACCAGCCACA | 3302 | 1037- |
| 1963114 | GCUGGUUGU | | 1059 | GCAGUUGUGU | | 1059 |
| AD- | CAACUGCUGUGG | 2943 | 1040- | ACCAACCAGCCAC | 3303 | 1038- |
| 1963115 | CUGGUUGGU | | 1060 | AGCAGUUGUG | | 1060 |
| AD- | CUGCUGUGGCUG | 2944 | 1043- | AGCACCAACCAGC | 3304 | 1041- |
| 1963118 | GUUGGUGCU | | 1063 | CACAGCAGUU | | 1063 |
| AD- | GUGGCUGGUUGG | 2945 | 1048- | AACAAAGCACCAA | 3305 | 1046- |
| 1963123 | UGCUUUGUU | | 1068 | CCAGCCACAG | | 1068 |
| AD- | GGCUGGUUGGUG | 2946 | 1050- | AAAACAAAGCACC | 3306 | 1048- |
| 1963125 | CUUUGUUUU | | 1070 | AACCAGCCAC | | 1070 |
| AD- | GCUGGUUGGUGC | 2947 | 1051- | AUAAACAAAGCAC | 3307 | 1049- |
| 1963126 | UUUGUUUAU | | 1071 | CAACCAGCCA | | 1071 |
| AD- | CUGGUUGGUGCU | 2948 | 1052- | AAUAAACAAAGCA | 3308 | 1050- |
| 1963127 | UUGUUUAUU | | 1072 | CCAACCAGCC | | 1072 |
| AD- | UGGUUGGUGCUU | 2949 | 1053- | ACAUAAACAAAGC | 3309 | 1051- |
| 1963128 | UGUUUAUGU | | 1073 | ACCAACCAGC | | 1073 |
| AD- | GGUUGGUGCUUU | 2950 | 1054- | ACCAUAAACAAAG | 3310 | 1052- |
| 1963129 | GUUUAUGGU | | 1074 | CACCAACCAG | | 1074 |
| AD- | GUUGGUGCUUUG | 2951 | 1055- | AACCAUAAACAAA | 3311 | 1053- |
| 1963130 | UUUAUGGUU | | 1075 | GCACCAACCA | | 1075 |
| AD- | UUGGUGCUUUGU | 2952 | 1056- | AUACCAUAAACAA | 3312 | 1054- |
| 1963131 | UUAUGGUAU | | 1076 | AGCACCAACC | | 1076 |
| AD- | UGGUGCUUUGUU | 2953 | 1057- | ACUACCAUAAACA | 3313 | 1055- |
| 1963132 | UAUGGUAGU | | 1077 | AAGCACCAAC | | 1077 |
| AD- | UGCUUUGUUUAU | 2954 | 1060- | ACUACUACCAUAA | 3314 | 1058- |
| 1963135 | GGUAGUAGU | | 1080 | ACAAAGCACC | | 1080 |
| AD- | UUUGUUUAUGGU | 2955 | 1063- | AAAACUACUACCA | 3315 | 1061- |
| 1963138 | AGUAGUUUU | | 1083 | UAAACAAAGC | | 1083 |
| AD- | UUGUUUAUGGUA | 2956 | 1064- | AAAAACUACUACC | 3316 | 1062- |
| 1963139 | GUAGUUUUU | | 1084 | AUAAACAAAG | | 1084 |
| AD- | GUUUAUGGUAGU | 2957 | 1066- | AGAAAAACUACUA | 3317 | 1064- |
| 1963140 | AGUUUUUCU | | 1086 | CCAUAAACAA | | 1086 |
| AD- | UUUAUGGUAGUA | 2958 | 1067- | AAGAAAAACUACU | 3318 | 1065- |
| 1963141 | GUUUUUCUU | | 1087 | ACCAUAAACA | | 1087 |
| AD- | UUAUGGUAGUAG | 2959 | 1068- | ACAGAAAAACUAC | 3319 | 1066- |
| 1963142 | UUUUUCUGU | | 1088 | UACCAUAAAC | | 1088 |
| AD- | UAUGGUAGUAGU | 2960 | 1069- | AACAGAAAAACUA | 3320 | 1067- |
| 1963143 | UUUUCUGUU | | 1089 | CUACCAUAAA | | 1089 |
| AD- | AUGGUAGUAGUU | 2961 | 1070- | AUACAGAAAAACU | 3321 | 1068- |
| 1963144 | UUUCUGUAU | | 1090 | ACUACCAUAA | | 1090 |
| AD- | UAGUAGUUUUUC | 2962 | 1074- | AGUGUUACAGAAA | 3322 | 1072- |
| 1963148 | UGUAACACU | | 1094 | AACUACUACC | | 1094 |
| AD- | AGAAUAAAGUAC | 2963 | 1114- | AAAGUCAAGGUAC | 3323 | 1112- |
| 1963202 | CUUGACUUU | | 1134 | UUUAUUCUUA | | 1134 |
| AD- | AAUAAAGUACCU | 2964 | 1116- | ACAAAGUCAAGGU | 3324 | 1114- |
| 1963204 | UGACUUUGU | | 1136 | ACUUUAUUCU | | 1136 |
| AD- | AUAAAGUACCUU | 2965 | 1117- | AACAAAGUCAAGG | 3325 | 1115- |
| 1963205 | GACUUUGUU | | 1137 | UACUUUAUUC | | 1137 |
| AD- | UAAAGUACCUUG | 2966 | 1118- | AAACAAAGUCAAG | 3326 | 1116- |
| 1963206 | ACUUUGUUU | | 1138 | GUACUUUAUU | | 1138 |
| AD- | AAAGUACCUUGA | 2967 | 1119- | AGAACAAAGUCAA | 3327 | 1117- |
| 1963207 | CUUUGUUCU | | 1139 | GGUACUUUAU | | 1139 |
| AD- | AAGUACCUUGAC | 2968 | 1120- | AUGAACAAAGUCA | 3328 | 1118- |
| 1963208 | UUUGUUCAU | | 1140 | AGGUACUUUA | | 1140 |
| AD- | UACCUUGACUUU | 2969 | 1123- | ACUGUGAACAAAG | 3329 | 1121- |
| 1963211 | GUUCACAGU | | 1143 | UCAAGGUACU | | 1143 |
| AD- | ACUUUGUUCACA | 2970 | 1130- | ACUACAUGCUGUG | 3330 | 1128- |
| 1963218 | GCAUGUAGU | | 1150 | AACAAAGUCA | | 1150 |
| AD- | CUUUGUUCACAG | 2971 | 1131- | ACCUACAUGCUGU | 3331 | 1129- |
| 1963219 | CAUGUAGGU | | 1151 | GAACAAAGUC | | 1151 |
| AD- | UUUGUUCACAGC | 2972 | 1132- | ACCCUACAUGCUG | 3332 | 1130- |
| 1963220 | AUGUAGGGU | | 1152 | UGAACAAAGU | | 1152 |
| AD- | UUGUUCACAGCA | 2973 | 1133- | AACCCUACAUGCU | 3333 | 1131- |
| 1963221 | UGUAGGGUU | | 1153 | GUGAACAAAG | | 1153 |
| AD- | UGUUCACAGCAU | 2974 | 1134- | ACACCCUACAUGC | 3334 | 1132- |
| 1963222 | GUAGGGUGU | | 1154 | UGUGAACAAA | | 1154 |
| AD- | UCACAGCAUGUA | 2975 | 1137- | ACAUCACCCUACA | 3335 | 1135- |
| 1963225 | GGGUGAUGU | | 1157 | UGCUGUGAAC | | 1157 |
| AD- | CAACGGACCUGA | 2976 | 105-125 | AGCCAGTGCUCAG | 3336 | 103-125 |
| 1963237 | GCACUGGCU | | | GUCCGUUGUG | | |
| AD- | ACGGACCUGAGC | 2977 | 107-127 | AAUGCCAGUGCUC | 3337 | 105-127 |
| 1963239 | ACUGGCAUU | | | AGGUCCGUUG | | |
| AD- | CCUGAGCACUGG | 2978 | 112-132 | AUCCTUAUGCCAG | 3338 | 110-132 |
| 1963244 | CAUAAGGAU | | | UGCUCAGGUC | | |
| AD- | CUGAGCACUGGC | 2979 | 113-133 | AGUCCUTAUGCCA | 3339 | 111-133 |
| 1963245 | AUAAGGACU | | | GUGCUCAGGU | | |
| AD- | UGAGCACUGGCA | 2980 | 114-134 | AAGUCCTUAUGCC | 3340 | 112-134 |
| 1963246 | UAAGGACUU | | | AGUGCUCAGG | | |
| AD- | GCACUGGCAUAA | 2981 | 117-137 | AGGAAGTCCUUAU | 3341 | 115-137 |
| 1963249 | GGACUUCCU | | | GCCAGUGCUC | | |
| AD- | GACUAAAAUGCU | 2982 | 1173- | AUUAAAAGCAGCA | 3342 | 1171- |
| 1963287 | GCUUUUAAU | | 1193 | UUUUAGUCAA | | 1193 |
| AD- | ACUAAAAUGCUG | 2983 | 1174- | AUUUAAAAGCAGC | 3343 | 1172- |
| 1963288 | CUUUUAAAU | | 1194 | AUUUUAGUCA | | 1194 |
| AD- | CUAAAAUGCUGC | 2984 | 1175- | AUUUUAAAAGCAG | 3344 | 1173- |
| 1963289 | UUUUAAAAU | | 1195 | CAUUUUAGUC | | 1195 |
| AD- | UAAAAUGCUGCU | 2985 | 1176- | AGUUUUAAAAGCA | 3345 | 1174- |
| 1963290 | UUUAAAACU | | 1196 | GCAUUUUAGU | | 1196 |
| AD- | UGCUGCUUUUAA | 2986 | 1181- | ACCUAUGUUUUAA | 3346 | 1179- |
| 1963295 | AACAUAGGU | | 1201 | AAGCAGCAUU | | 1201 |
| AD- | GCUGCUUUUAAA | 2987 | 1182- | AUCCUAUGUUUUA | 3347 | 1180- |
| 1963296 | ACAUAGGAU | | 1202 | AAAGCAGCAU | | 1202 |
| AD- | UUUAAAACAUAG | 2988 | 1188- | ACUACUUUCCUAU | 3348 | 1186- |
| 1963302 | GAAAGUAGU | | 1208 | GUUUUAAAAG | | 1208 |
| AD- | CUGUUGACAUCG | 2989 | 164-184 | AAUGAGTGUCGAU | 3349 | 162-184 |
| 1963306 | ACACUCAUU | | | GUCAACAGGG | | |
| AD- | GUUGACAUCGAC | 2990 | 166-186 | AGUATGAGUGUCG | 3350 | 164-186 |
| 1963308 | ACUCAUACU | | | AUGUCAACAG | | |
| AD- | GACAUCGACACU | 2991 | 169-189 | AGCUGUAUGAGUG | 3351 | 167-189 |
| 1963311 | CAUACAGCU | | | UCGAUGUCAA | | |
| AD- | ACAUCGACACUC | 2992 | 170-190 | AGGCTGTAUGAGU | 3352 | 168-190 |
| 1963312 | AUACAGCCU | | | GUCGAUGUCA | | |
| AD- | AUCGACACUCAU | 2993 | 172-192 | AUUGGCTGUAUGA | 3353 | 170-192 |
| 1963314 | ACAGCCAAU | | | GUGUCGAUGU | | |
| AD- | ACACUCAUACAG | 2994 | 176-196 | AAUACUTGGCUGU | 3354 | 174-196 |
| 1963318 | CCAAGUAUU | | | AUGAGUGUCG | | |
| AD- | CUCAUACAGCCA | 2995 | 179-199 | AGUCAUACUUGGC | 3355 | 177-199 |
| 1963321 | AGUAUGACU | | | UGUAUGAGUG | | |
| AD- | UCAUACAGCCAA | 2996 | 180-200 | AGGUCATACUUGG | 3356 | 178-200 |
| 1963322 | GUAUGACCU | | | CUGUAUGAGU | | |
| AD- | CAUACAGCCAAG | 2997 | 181-201 | AGGGTCAUACUUG | 3357 | 179-201 |
| 1963323 | UAUGACCCU | | | GCUGUAUGAG | | |
| AD- | UACAGCCAAGUA | 2998 | 183-203 | AAAGGGTCAUACU | 3358 | 181-203 |
| 1963325 | UGACCCUUU | | | UGGCUGUAUG | | |
| AD- | GCCAAGUAUGAC | 2999 | 187-207 | AAGGGAAGGGUCA | 3359 | 185-207 |
| 1963329 | CCUUCCCUU | | | UACUUGGCUG | | |
| AD- | GAUAAAUUGAGC | 3000 | 1236- | ACUUAACUAGCUC | 3360 | 1234- |
| 1963375 | UAGUUAAGU | | 1256 | AAUUUAUCUU | | 1256 |
| AD- | AUAAAUUGAGCU | 3001 | 1237- | ACCUUAACUAGCU | 3361 | 1235- |
| 1963376 | AGUUAAGGU | | 1257 | CAAUUUAUCU | | 1257 |
| AD- | UAAAUUGAGCUA | 3002 | 1238- | AGCCUUAACUAGC | 3362 | 1236- |
| 1963377 | GUUAAGGCU | | 1258 | UCAAUUUAUC | | 1258 |
| AD- | GUAUGACCCUUC | 3003 | 192-212 | AGCUTCAGGGAAG | 3363 | 190-212 |
| 1963384 | CCUGAAGCU | | | GGUCAUACUU | | |
| AD- | CUGUCUGUUUCC | 3004 | 214-234 | AUGATCAUAGGAA | 3364 | 212-234 |
| 1963386 | UAUGAUCAU | | | ACAGACAGGG | | |
| AD- | GUCUGUUUCCUA | 3005 | 216-236 | ACUUGATCAUAGG | 3365 | 214-236 |
| 1963388 | UGAUCAAGU | | | AAACAGACAG | | |
| AD- | UCUGUUUCCUAU | 3006 | 217-237 | AGCUTGAUCAUAG | 3366 | 215-237 |
| 1963389 | GAUCAAGCU | | | GAAACAGACA | | |
| AD- | UGUUUCCUAUGA | 3007 | 219-239 | AUUGCUTGAUCAU | 3367 | 217-239 |
| 1963391 | UCAAGCAAU | | | AGGAAACAGA | | |
| AD- | GUUUCCUAUGAU | 3008 | 220-240 | AGUUGCTUGAUCA | 3368 | 218-240 |
| 1963392 | CAAGCAACU | | | UAGGAAACAG | | |
| AD- | UCCUAUGAUCAA | 3009 | 223-243 | AGAAGUTGCUUGA | 3369 | 221-243 |
| 1963395 | GCAACUUCU | | | UCAUAGGAAA | | |
| AD- | AGCUAGUUAAGG | 3010 | 1245- | ACUGAUUUGCCUU | 3370 | 1243- |
| 1963410 | CAAAUCAGU | | 1265 | AACUAGCUCA | | 1265 |
| AD- | GCUAGUUAAGGC | 3011 | 1246- | ACCUGAUUUGCCU | 3371 | 1244- |
| 1963411 | AAAUCAGGU | | 1266 | UAACUAGCUC | | 1266 |
| AD- | UAAGGCAAAUCA | 3012 | 1252- | AAUUUUACCUGAU | 3372 | 1250- |
| 1963417 | GGUAAAAUU | | 1272 | UUGCCUUAAC | | 1272 |
| AD- | AGGCAAAUCAGG | 3013 | 1254- | ACUAUUUUACCUG | 3373 | 1252- |
| 1963419 | UAAAAUAGU | | 1274 | AUUUGCCUUA | | 1274 |
| AD- | GGCAAAUCAGGU | 3014 | 1255- | AACUAUUUUACCU | 3374 | 1253- |
| 1963420 | AAAAUAGUU | | 1275 | GAUUUGCCUU | | 1275 |
| AD- | GCAAAUCAGGUA | 3015 | 1256- | AGACUAUUUUACC | 3375 | 1254- |
| 1963421 | AAAUAGUCU | | 1276 | UGAUUUGCCU | | 1276 |
| AD- | GUAAAAUAGUCA | 3016 | 1265- | AUAGAAUCAUGAC | 3376 | 1263- |
| 1963430 | UGAUUCUAU | | 1285 | UAUUUUACCU | | 1285 |
| AD- | UAAAAUAGUCAU | 3017 | 1266- | AAUAGAAUCAUGA | 3377 | 1264- |
| 1963431 | GAUUCUAUU | | 1286 | CUAUUUUACC | | 1286 |
| AD- | AAAAUAGUCAUG | 3018 | 1267- | ACAUAGAAUCAUG | 3378 | 1265- |
| 1963432 | AUUCUAUGU | | 1287 | ACUAUUUUAC | | 1287 |
| AD- | AGUCAUGAUUCU | 3019 | 1272- | ACAUUACAUAGAA | 3379 | 1270- |
| 1963437 | AUGUAAUGU | | 1292 | UCAUGACUAU | | 1292 |
| AD- | GUCAUGAUUCUA | 3020 | 1273- | AACAUUACAUAGA | 3380 | 1271- |
| 1963438 | UGUAAUGUU | | 1293 | AUCAUGACUA | | 1293 |
| AD- | UCAUGAUUCUAU | 3021 | 1274- | AUACAUUACAUAG | 3381 | 1272- |
| 1963439 | GUAAUGUAU | | 1294 | AAUCAUGACU | | 1294 |
| AD- | CCCUGAGGAUCC | 3022 | 242-262 | AAUUGUTGAGGAU | 3382 | 240-262 |
| 1963464 | UCAACAAUU | | | CCUCAGGGAA | | |
| AD- | CCUGAGGAUCCU | 3023 | 243-263 | ACAUTGTUGAGGA | 3383 | 241-263 |
| 1963465 | CAACAAUGU | | | UCCUCAGGGA | | |
| AD- | GAGGAUCCUCAA | 3024 | 246-266 | AGACCATUGUUGA | 3384 | 244-266 |
| 1963468 | CAAUGGUCU | | | GGAUCCUCAG | | |
| AD- | AGGAUCCUCAAC | 3025 | 247-267 | AUGACCAUUGUUG | 3385 | 245-267 |
| 1963469 | AAUGGUCAU | | | AGGAUCCUCA | | |
| AD- | UGCUUUCAACGU | 3026 | 267-287 | ACAAACTCCACGU | 3386 | 265-287 |
| 1963539 | GGAGUUUGU | | | UGAAAGCAUG | | |
| AD- | UUCAACGUGGAG | 3027 | 271-291 | AUCATCAAACUCC | 3387 | 269-291 |
| 1963543 | UUUGAUGAU | | | ACGUUGAAAG | | |
| AD- | CAACGUGGAGUU | 3028 | 273-293 | AAGUCATCAAACU | 3388 | 271-293 |
| 1963545 | UGAUGACUU | | | CCACGUUGAA | | |
| AD- | AACGUGGAGUUU | 3029 | 274-294 | AGAGTCAUCAAAC | 3389 | 272-294 |
| 1963546 | GAUGACUCU | | | UCCACGUUGA | | |
| AD- | CGUGGAGUUUGA | 3030 | 276-296 | AGAGAGTCAUCAA | 3390 | 274-296 |
| 1963548 | UGACUCUCU | | | ACUCCACGUU | | |
| AD- | UGGAGUUUGAUG | 3031 | 278-298 | ACUGAGAGUCAUC | 3391 | 276-298 |
| 1963550 | ACUCUCAGU | | | AAACUCCACG | | |
| AD- | GAGUUUGAUGAC | 3032 | 280-300 | AUCCTGAGAGUCA | 3392 | 278-300 |
| 1963552 | UCUCAGGAU | | | UCAAACUCCA | | |
| AD- | GUUUGAUGACUC | 3033 | 282-302 | AUGUCCTGAGAGU | 3393 | 280-302 |
| 1963554 | UCAGGACAU | | | CAUCAAACUC | | |
| AD- | UGAUGACUCUCA | 3034 | 285-305 | ACUUTGTCCUGAG | 3394 | 283-305 |
| 1963557 | GGACAAAGU | | | AGUCAUCAAA | | |
| AD- | UAAUUAGAGUUG | 3035 | 1460- | ACUGUAUCACAAC | 3395 | 1458- |
| 1963582 | UGAUACAGU | | 1480 | UCUAAUUAUA | | 1480 |
| AD- | GUUGUGAUACAG | 3036 | 1468- | AAAUAUACUCUGU | 3396 | 1466- |
| 1963590 | AGUAUAUUU | | 1488 | AUCACAACUC | | 1488 |
| AD- | UUGUGAUACAGA | 3037 | 1469- | AAAAUAUACUCUG | 3397 | 1467- |
| 1963591 | GUAUAUUUU | | 1489 | UAUCACAACU | | 1489 |
| AD- | UGUGAUACAGAG | 3038 | 1470- | AGAAAUAUACUCU | 3398 | 1468- |
| 1963592 | UAUAUUUCU | | 1490 | GUAUCACAAC | | 1490 |
| AD- | AUGACUCUCAGG | 3039 | 287-307 | AUGCTUTGUCCUG | 3399 | 285-307 |
| 1963609 | ACAAAGCAU | | | AGAGUCAUCA | | |
| AD- | UGACUCUCAGGA | 3040 | 288-308 | ACUGCUTUGUCCU | 3400 | 286-308 |
| 1963610 | CAAAGCAGU | | | GAGAGUCAUC | | |
| AD- | CCAUUCAGACAA | 3041 | 1489- | AAUGAUAUAUUGU | 3401 | 1487- |
| 1963618 | UAUAUCAUU | | 1509 | CUGAAUGGAA | | 1509 |
| AD- | ACUUCACUUGGU | 3042 | 426-446 | AUCCAGTGAACCA | 3402 | 424-446 |
| 1963719 | UCACUGGAU | | | AGUGAAGUUC | | |
| AD- | UUCACUUGGUUC | 3043 | 428-448 | AGUUCCAGUGAAC | 3403 | 426-448 |
| 1963721 | ACUGGAACU | | | CAAGUGAAGU | | |
| AD- | GAUUUUGGGAAA | 3044 | 460-480 | AUGCACAGCUUUC | 3404 | 458-480 |
| 1963733 | GCUGUGCAU | | | CCAAAAUCCC | | |
| AD- | UUUUGGGAAAGC | 3045 | 462-482 | AGCUGCACAGCUU | 3405 | 460-482 |
| 1963735 | UGUGCAGCU | | | UCCCAAAAUC | | |
| AD- | UGGGAAAGCUGU | 3046 | 465-485 | AGUUGCTGCACAG | 3406 | 463-485 |
| 1963738 | GCAGCAACU | | | CUUUCCCAAA | | |
| AD- | UGGACUGGCCGU | 3047 | 489-509 | AUACCUAGAACGG | 3407 | 487-509 |
| 1963762 | UCUAGGUAU | | | CCAGUCCAUC | | |
| AD- | GGACUGGCCGUU | 3048 | 490-510 | AAUACCTAGAACG | 3408 | 488-510 |
| 1963763 | CUAGGUAUU | | | GCCAGUCCAU | | |
| AD- | UAGGUAUUUUUU | 3049 | 503-523 | AAACCUTCAAAAA | 3409 | 501-523 |
| 1963776 | UGAAGGUUU | | | AAUACCUAGA | | |
| AD | UAUUUUUUUGAA | 3050 | 507-527 | AUGCCAACCUUCA | 3410 | 505-527 |
| 1963780 | GGUUGGCAU | | | AAAAAAUACC | | |
| AD- | AUUUUUUUGAAG | 3051 | 508-528 | ACUGCCAACCUUC | 3411 | 506-528 |
| 1963781 | GUUGGCAGU | | | AAAAAAAUAC | | |
| AD- | UUUUGAAGGUUG | 3052 | 512-532 | AAGCGCTGCCAAC | 3412 | 510-532 |
| 1963785 | GCAGCGCUU | | | CUUCAAAAAA | | |
| AD- | AAGGUUGGCAGC | 3053 | 517-537 | AGGUTUAGCGCUG | 3413 | 515-537 |
| 1963790 | GCUAAACCU | | | CCAACCUUCA | | |
| AD- | CUUCAGAAAGUU | 3054 | 541-561 | AACATCAACAACU | 3414 | 539-561 |
| 1963814 | GUUGAUGUU | | | UUCUGAAGGC | | |
| AD- | UCAGAAAGUUGU | 3055 | 543-563 | AGCACATCAACAA | 3415 | 541-563 |
| 1963816 | UGAUGUGCU | | | CUUUCUGAAG | | |
| AD- | CAGAAAGUUGUU | 3056 | 544-564 | AAGCACAUCAACA | 3416 | 542-564 |
| 1963817 | GAUGUGCUU | | | ACUUUCUGAA | | |
| AD- | GAAAGUUGUUGA | 3057 | 546-566 | ACCAGCACAUCAA | 3417 | 544-566 |
| 1963819 | UGUGCUGGU | | | CAACUUUCUG | | |
| AD- | AUUCCAUUAAAA | 3058 | 566-586 | AGCCCUTUGUUUU | 3418 | 564-586 |
| 1963839 | CAAAGGGCU | | | AAUGGAAUCC | | |
| AD- | UUCCAUUAAAAC | 3059 | 567-587 | AUGCCCTUUGUUU | 3419 | 565-587 |
| 1963840 | AAAGGGCAU | | | UAAUGGAAUC | | |
| AD- | UUAAAACAAAGG | 3060 | 572-592 | AACUCUTGCCCUU | 3420 | 570-592 |
| 1963845 | GCAAGAGUU | | | UGUUUUAAUG | | |
| AD- | UAAAACAAAGGG | 3061 | 573-593 | ACACTCTUGCCCUU | 3421 | 571-593 |
| 1963846 | CAAGAGUGU | | | UGUUUUAAU | | |
| AD- | AAACAAAGGGCA | 3062 | 575-595 | AAGCACTCUUGCC | 3422 | 573-595 |
| 1963848 | AGAGUGCUU | | | CUUUGUUUUA | | |
| AD- | ACAAAGGGCAAG | 3063 | 577-597 | AUCAGCACUCUUG | 3423 | 575-597 |
| 1963850 | AGUGCUGAU | | | CCCUUUGUUU | | |
| AD- | AAGGGCAAGAGU | 3064 | 580-600 | AAAGTCAGCACUC | 3424 | 578-600 |
| 1963853 | GCUGACUUU | | | UUGCCCUUUG | | |
| AD- | GGGCAAGAGUGC | 3065 | 582-602 | AUGAAGTCAGCAC | 3425 | 580-602 |
| 1963855 | UGACUUCAU | | | UCUUGCCCUU | | |
| AD- | GCAAGAGUGCUG | 3066 | 584-604 | AAGUGAAGUCAGC | 3426 | 582-604 |
| 1963857 | ACUUCACUU | | | ACUCUUGCCC | | |
| AD- | CAAGAGUGCUGA | 3067 | 585-605 | AUAGTGAAGUCAG | 3427 | 583-605 |
| 1963858 | CUUCACUAU | | | CACUCUUGCC | | |
| AD- | AGAGUGCUGACU | 3068 | 587-607 | AGUUAGTGAAGUC | 3428 | 585-607 |
| 1963860 | UCACUAACU | | | AGCACUCUUG | | |
| AD- | GUGCUGACUUCA | 3069 | 590-610 | AGAAGUTAGUGAA | 3429 | 588-610 |
| 1963863 | CUAACUUCU | | | GUCAGCACUC | | |
| AD- | UGCUGACUUCAC | 3070 | 591-611 | ACGAAGTUAGUGA | 3430 | 589-611 |
| 1963864 | UAACUUCGU | | | AGUCAGCACU | | |
| AD- | CUUCACUAACUU | 3071 | 597-617 | AGAGGATCGAAGU | 3431 | 595-617 |
| 1963870 | CGAUCCUCU | | | UAGUGAAGUC | | |
| AD- | UUCACUAACUUC | 3072 | 598-618 | ACGAGGAUCGAAG | 3432 | 596-618 |
| 1963871 | GAUCCUCGU | | | UUAGUGAAGU | | |
| AD- | GCCUCCUUCCUG | 3073 | 620-640 | ACAAGGAUUCAGG | 3433 | 618-640 |
| 1963893 | AAUCCUUGU | | | AAGGAGGCCA | | |
| AD- | UCCUUCCUGAAU | 3074 | 623-643 | AAUCCAAGGAUUC | 3434 | 621-643 |
| 1963896 | CCUUGGAUU | | | AGGAAGGAGG | | |
| AD- | GGACCUACCCAG | 3075 | 647-667 | ACAGTGAGCCUGG | 3435 | 645-667 |
| 1963920 | GCUCACUGU | | | GUAGGUCCAG | | |
| AD- | ACCUACCCAGGC | 3076 | 649-669 | AGUCAGTGAGCCU | 3436 | 647-669 |
| 1963922 | UCACUGACU | | | GGGUAGGUCC | | |
| AD- | CUACCCAGGCUC | 3077 | 651-671 | AUGGTCAGUGAGC | 3437 | 649-671 |
| 1963924 | ACUGACCAU | | | CUGGGUAGGU | | |
| AD- | ACCCAGGCUCAC | 3078 | 653-673 | AGGUGGTCAGUGA | 3438 | 651-673 |
| 1963926 | UGACCACCU | | | GCCUGGGUAG | | |
| AD- | CUCCUCUUCUGG | 3079 | 674-694 | ACACACAUUCCAG | 3439 | 672-694 |
| 1963927 | AAUGUGUGU | | | AAGAGGAGGG | | |
| AD- | CCUCUUCUGGAA | 3080 | 676-696 | AGUCACACAUUCC | 3440 | 674-696 |
| 1963929 | UGUGUGACU | | | AGAAGAGGAG | | |
| AD- | UCUUCUGGAAUG | 3081 | 678-698 | AAGGTCACACAUU | 3441 | 676-698 |
| 1963931 | UGUGACCUU | | | CCAGAAGAGG | | |
| AD- | UUCUGGAAUGUG | 3082 | 680-700 | ACCAGGTCACACA | 3442 | 678-700 |
| 1963933 | UGACCUGGU | | | UUCCAGAAGA | | |
| AD- | UGGAAUGUGUGA | 3083 | 683-703 | AAAUCCAGGUCAC | 3443 | 681-703 |
| 1963936 | CCUGGAUUU | | | ACAUUCCAGA | | |
| AD- | UGUGUGACCUGG | 3084 | 688-708 | AAGCACAAUCCAG | 3444 | 686-708 |
| 1963941 | AUUGUGCUU | | | GUCACACAUU | | |
| AD- | UGUGACCUGGAU | 3085 | 690-710 | AUGAGCACAAUCC | 3445 | 688-710 |
| 1963943 | UGUGCUCAU | | | AGGUCACACA | | |
| AD- | GACCUGGAUUGU | 3086 | 693-713 | ACCUTGAGCACAA | 3446 | 691-713 |
| 1963946 | GCUCAAGGU | | | UCCAGGUCAC | | |
| AD- | CCUGGAUUGUGC | 3087 | 695-715 | AUUCCUTGAGCAC | 3447 | 693-715 |
| 1963948 | UCAAGGAAU | | | AAUCCAGGUC | | |
| AD- | CUGGAUUGUGCU | 3088 | 696-716 | AGUUCCTUGAGCA | 3448 | 694-716 |
| 1963949 | CAAGGAACU | | | CAAUCCAGGU | | |
| AD- | GAUUGUGCUCAA | 3089 | 699-719 | AUGGGUTCCUUGA | 3449 | 697-719 |
| 1963952 | GGAACCCAU | | | GCACAAUCCA | | |
| AD- | AUUGUGCUCAAG | 3090 | 700-720 | AAUGGGTUCCUUG | 3450 | 698-720 |
| 1963953 | GAACCCAUU | | | AGCACAAUCC | | |
| AD- | UGCUCAAGGAAC | 3091 | 704-724 | AGCUGATGGGUUC | 3451 | 702-724 |
| 1963957 | CCAUCAGCU | | | CUUGAGCACA | | |
| AD- | GCUCAAGGAACC | 3092 | 705-725 | ACGCTGAUGGGUU | 3452 | 703-725 |
| 1963958 | CAUCAGCGU | | | CCUUGAGCAC | | |
| AD- | UCAAGGAACCCA | 3093 | 707-727 | AGACGCTGAUGGG | 3453 | 705-727 |
| 1963960 | UCAGCGUCU | | | UUCCUUGAGC | | |
| AD- | GGAACCCAUCAG | 3094 | 711-731 | AUGCTGACGCUGA | 3454 | 709-731 |
| 1963964 | CGUCAGCAU | | | UGGGUUCCUU | | |
| AD- | AACCCAUCAGCG | 3095 | 713-733 | AGCUGCTGACGCU | 3455 | 711-733 |
| 1963966 | UCAGCAGCU | | | GAUGGGUUCC | | |
| AD- | UUGAAAUUCCGU | 3096 | 742-762 | AUUAAGTUUACGG | 3456 | 740-762 |
| 1963995 | AAACUUAAU | | | AAUUUCAACA | | |
| AD- | GAAAUUCCGUAA | 3097 | 744-764 | AAGUTAAGUUUAC | 3457 | 742-764 |
| 1963997 | ACUUAACUU | | | GGAAUUUCAA | | |
| AD- | AAUUCCGUAAAC | 3098 | 746-766 | AGAAGUTAAGUUU | 3458 | 744-766 |
| 1963999 | UUAACUUCU | | | ACGGAAUUUC | | |
| AD- | AUUCCGUAAACU | 3099 | 747-767 | AUGAAGTUAAGUU | 3459 | 745-767 |
| 1964000 | UAACUUCAU | | | UACGGAAUUU | | |
| AD- | UCCGUAAACUUA | 3100 | 749-769 | AAUUGAAGUUAAG | 3460 | 747-769 |
| 1964002 | ACUUCAAUU | | | UUUACGGAAU | | |
| AD- | CCGUAAACUUAA | 3101 | 750-770 | ACAUTGAAGUUAA | 3461 | 748-770 |
| 1964003 | CUUCAAUGU | | | GUUUACGGAA | | |
| AD- | CGAAGAACUGAU | 3102 | 783-803 | AUGUCCACCAUCA | 3462 | 781-803 |
| 1964016 | GGUGGACAU | | | GUUCUUCGGG | | |
| AD- | AGAACUGAUGGU | 3103 | 786-806 | AAGUTGTCCACCA | 3463 | 784-806 |
| 1964019 | GGACAACUU | | | UCAGUUCUUC | | |
| AD- | AACUGAUGGUGG | 3104 | 788-808 | ACCAGUTGUCCAC | 3464 | 786-808 |
| 1964021 | ACAACUGGU | | | CAUCAGUUCU | | |
| AD- | ACUGAUGGUGGA | 3105 | 789-809 | AGCCAGTUGUCCA | 3465 | 787-809 |
| 1964022 | CAACUGGCU | | | CCAUCAGUUC | | |
| AD- | UGAUGGUGGACA | 3106 | 791-811 | AGCGCCAGUUGUC | 3466 | 789-811 |
| 1964024 | ACUGGCGCU | | | CACCAUCAGU | | |
| AD- | CAGCUCAGCCAC | 3107 | 812-832 | AGUUCUTCAGUGG | 3467 | 810-832 |
| 1964043 | UGAAGAACU | | | CUGAGCUGGG | | |
| AD- | AGCUCAGCCACU | 3108 | 813-833 | AUGUTCTUCAGUG | 3468 | 811-833 |
| 1964044 | GAAGAACAU | | | GCUGAGCUGG | | |
| AD- | CUCAGCCACUGA | 3109 | 815-835 | ACCUGUTCUUCAG | 3469 | 813-835 |
| 1964046 | AGAACAGGU | | | UGGCUGAGCU | | |
| AD- | UCAGCCACUGAA | 3110 | 816-836 | AGCCTGTUCUUCA | 3470 | 814-836 |
| 1964047 | GAACAGGCU | | | GUGGCUGAGC | | |
| AD- | AGCCACUGAAGA | 3111 | 818-838 | AUUGCCTGUUCUU | 3471 | 816-838 |
| 1964049 | ACAGGCAAU | | | CAGUGGCUGA | | |
| AD- | ACUGAAGAACAG | 3112 | 822-842 | AUGATUTGCCUGU | 3472 | 820-842 |
| 1964053 | GCAAAUCAU | | | UCUUCAGUGG | | |
| AD- | CUGAAGAACAGG | 3113 | 823-843 | AUUGAUTUGCCUG | 3473 | 821-843 |
| 1964054 | CAAAUCAAU | | | UUCUUCAGUG | | |
| AD- | UGAAGAACAGGC | 3114 | 824-844 | AUUUGATUUGCCU | 3474 | 822-844 |
| 1964055 | AAAUCAAAU | | | GUUCUUCAGU | | |
| AD- | GAAGAACAGGCA | 3115 | 825-845 | ACUUTGAUUUGCC | 3475 | 823-845 |
| 1964056 | AAUCAAAGU | | | UGUUCUUCAG | | |
| AD- | AGAACAGGCAAA | 3116 | 827-847 | AAGCTUTGAUUUG | 3476 | 825-847 |
| 1964058 | UCAAAGCUU | | | CCUGUUCUUC | | |
| AD- | GAACAGGCAAAU | 3117 | 828-848 | AAAGCUTUGAUUU | 3477 | 826-848 |
| 1964059 | CAAAGCUUU | | | GCCUGUUCUU | | |
| AD- | AACAGGCAAAUC | 3118 | 829-849 | AGAAGCTUUGAUU | 3478 | 827-849 |
| 1964060 | AAAGCUUCU | | | UGCCUGUUCU | | |
| AD- | AGGCAAAUCAAA | 3119 | 832-852 | AAAGGAAGCUUUG | 3479 | 830-852 |
| 1964063 | GCUUCCUUU | | | AUUUGCCUGU | | |
| AD- | GGCAAAUCAAAG | 3120 | 833-853 | AGAAGGAAGCUUU | 3480 | 831-853 |
| 1964064 | CUUCCUUCU | | | GAUUUGCCUG | | |
| AD- | AAAUCAAAGCUU | 3121 | 836-856 | AUUUGAAGGAAGC | 3481 | 834-856 |
| 1964067 | CCUUCAAAU | | | UUUGAUUUGC | | |
| AD- | AAUCAAAGCUUC | 3122 | 837-857 | AAUUTGAAGGAAG | 3482 | 835-857 |
| 1964068 | CUUCAAAUU | | | CUUUGAUUUG | | |
| AD- | UCAAAGCUUCCU | 3123 | 839-859 | AUUATUTGAAGGA | 3483 | 837-859 |
| 1964070 | UCAAAUAAU | | | AGCUUUGAUU | | |
| AD- | AAAGCUUCCUUC | 3124 | 841-861 | AUCUTATUUGAAG | 3484 | 839-861 |
| 1964072 | AAAUAAGAU | | | GAAGCUUUGA | | |
| AD- | AAGCUUCCUUCA | 3125 | 842-862 | AAUCTUAUUUGAA | 3485 | 840-862 |
| 1964073 | AAUAAGAUU | | | GGAAGCUUUG | | |
| AD- | GCUUCCUUCAAA | 3126 | 844-864 | ACCATCTUAUUUG | 3486 | 842-864 |
| 1964075 | UAAGAUGGU | | | AAGGAAGCUU | | |
| AD- | UUCCUUCAAAUA | 3127 | 846-866 | AGACCATCUUAUU | 3487 | 844-866 |
| 1964077 | AGAUGGUCU | | | UGAAGGAAGC | | |
| AD- | UCCUUCAAAUAA | 3128 | 847-867 | AGGACCAUCUUAU | 3488 | 845-867 |
| 1964078 | GAUGGUCCU | | | UUGAAGGAAG | | |
| AD- | UUCAAAUAAGAU | 3129 | 850-870 | AAUGGGACCAUCU | 3489 | 848-870 |
| 1964081 | GGUCCCAUU | | | UAUUUGAAGG | | |
| AD- | GUCUGUAUCCAA | 3130 | 871-891 | AUUCAUTAUUUGG | 3490 | 869-891 |
| 1964102 | AUAAUGAAU | | | AUACAGACUA | | |
| AD- | UCUGUAUCCAAA | 3131 | 872-892 | AAUUCATUAUUUG | 3491 | 870-892 |
| 1964103 | UAAUGAAUU | | | GAUACAGACU | | |
| AD- | CUGUAUCCAAAU | 3132 | 873-893 | AGAUTCAUUAUUU | 3492 | 871-893 |
| 1964104 | AAUGAAUCU | | | GGAUACAGAC | | |
| AD- | GUAUCCAAAUAA | 3133 | 875-895 | AAAGAUTCAUUAU | 3493 | 873-895 |
| 1964106 | UGAAUCUUU | | | UUGGAUACAG | | |
| AD- | UAUCCAAAUAAU | 3134 | 876-896 | AGAAGATUCAUUA | 3494 | 874-896 |
| 1964107 | GAAUCUUCU | | | UUUGGAUACA | | |
| AD- | AUCCAAAUAAUG | 3135 | 877-897 | ACGAAGAUUCAUU | 3495 | 875-897 |
| 1964108 | AAUCUUCGU | | | AUUUGGAUAC | | |
| AD- | AAUGAAUCUUCG | 3136 | 885-905 | AGAAACACCCGAA | 3496 | 883-905 |
| 1964116 | GGUGUUUCU | | | GAUUCAUUAU | | |
| AD- | UGAAUCUUCGGG | 3137 | 887-907 | AGGGAAACACCCG | 3497 | 885-907 |
| 1964118 | UGUUUCCCU | | | AAGAUUCAUU | | |
| AD- | UUAGCUAAGCAC | 3138 | 908-928 | AGUAGATCUGUGC | 3498 | 906-928 |
| 1964139 | AGAUCUACU | | | UUAGCUAAAG | | |
| AD- | UAGCUAAGCACA | 3139 | 909-929 | AGGUAGAUCUGUG | 3499 | 907-929 |
| 1964140 | GAUCUACCU | | | CUUAGCUAAA | | |
| AD- | GCUAAGCACAGA | 3140 | 911-931 | AAAGGUAGAUCUG | 3500 | 909-931 |
| 1964142 | UCUACCUUU | | | UGCUUAGCUA | | |
| AD- | CUAAGCACAGAU | 3141 | 912-932 | ACAAGGTAGAUCU | 3501 | 910-932 |
| 1964143 | CUACCUUGU | | | GUGCUUAGCU | | |
| AD- | CAGAUCUACCUU | 3142 | 919-939 | AAAATCACCAAGG | 3502 | 917-939 |
| 1964150 | GGUGAUUUU | | | UAGAUCUGUG | | |
| AD- | AAUAAAAUGUGA | 3143 | 1001- | AUCUAGTCUUCAC | 3503 | 999-1021 |
| 1964229 | AGACUAGAU | | 1021 | AUUUUAUUAG | | |
| AD- | ACAACUGCUGUG | 3144 | 1039- | ACAACCAGCCACA | 3504 | 1037- |
| 1964267 | GCUGGUUGU | | 1059 | GCAGUUGUGU | | 1059 |
| AD- | CUGUGGCUGGUU | 3145 | 1046- | AAAAGCACCAACC | 3505 | 1044- |
| 1964274 | GGUGCUUUU | | 1066 | AGCCACAGCA | | 1066 |
| AD- | UUGGUGCUUUGU | 3146 | 1056- | AUACCATAAACAA | 3506 | 1054- |
| 1964284 | UUAUGGUAU | | 1076 | AGCACCAACC | | 1076 |
| AD | GCUUUGUUUAUG | 3147 | 1061- | AACUACTACCAUA | 3507 | 1059- |
| 1964289 | GUAGUAGUU | | 1081 | AACAAAGCAC | | 1081 |
| AD- | UUUGUUUAUGGU | 3148 | 1063- | AAAACUACUACCA | 3508 | 1061- |
| 1964291 | AGUAGUUUU | | 1083 | UAAACAAAGC | | 1083 |
| AD- | UUGUUUAUGGUA | 3149 | 1064- | AAAAACTACUACC | 3509 | 1062- |
| 1964292 | GUAGUUUUU | | 1084 | AUAAACAAAG | | 1084 |
| AD- | AUGGUAGUAGUU | 3150 | 1070- | AUACAGAAAAACU | 3510 | 1068- |
| 1964297 | UUUCUGUAU | | 1090 | ACUACCAUAA | | 1090 |
| AD- | GGUAGUAGUUUU | 3151 | 1072- | AGUUACAGAAAAA | 3511 | 1070- |
| 1964299 | UCUGUAACU | | 1092 | CUACUACCAU | | 1092 |
| AD- | UAGUAGUUUUUC | 3152 | 1074- | AGUGTUACAGAAA | 3512 | 1072- |
| 1964301 | UGUAACACU | | 1094 | AACUACUACC | | 1094 |
| AD- | AGUAGUUUUUCU | 3153 | 1075- | AUGUGUTACAGAA | 3513 | 1073- |
| 1964302 | GUAACACAU | | 1095 | AAACUACUAC | | 1095 |
| AD- | GUAGUUUUUCUG | 3154 | 1076- | ACUGTGTUACAGA | 3514 | 1074- |
| 1964303 | UAACACAGU | | 1096 | AAAACUACUA | | 1096 |
| AD- | AAUAAGAAUAAA | 3155 | 1110- | ACAAGGTACUUUA | 3515 | 1108- |
| 1964325 | GUACCUUGU | | 1130 | UUCUUAUUUC | | 1130 |
| AD- | AAGAAUAAAGUA | 3156 | 1113- | AAGUCAAGGUACU | 3516 | 1111- |
| 1964328 | CCUUGACUU | | 1133 | UUAUUCUUAU | | 1133 |
| AD- | AGAAUAAAGUAC | 3157 | 1114- | AAAGTCAAGGUAC | 3517 | 1112- |
| 1964329 | CUUGACUUU | | 1134 | UUUAUUCUUA | | 1134 |
| AD- | AAUAAAGUACCU | 3158 | 1116- | ACAAAGTCAAGGU | 3518 | 1114- |
| 1964331 | UGACUUUGU | | 1136 | ACUUUAUUCU | | 1136 |
| AD- | AAGUACCUUGAC | 3159 | 1120- | AUGAACAAAGUCA | 3519 | 1118- |
| 1964335 | UUUGUUCAU | | 1140 | AGGUACUUUA | | 1140 |
| AD- | GUACCUUGACUU | 3160 | 1122- | AUGUGAACAAAGU | 3520 | 1120- |
| 1964337 | UGUUCACAU | | 1142 | CAAGGUACUU | | 1142 |
| AD- | UACCUUGACUUU | 3161 | 1123- | ACUGTGAACAAAG | 3521 | 1121- |
| 1964338 | GUUCACAGU | | 1143 | UCAAGGUACU | | 1143 |
| AD- | CCUUGACUUUGU | 3162 | 1125- | AUGCTGTGAACAA | 3522 | 1123- |
| 1964340 | UCACAGCAU | | 1145 | AGUCAAGGUA | | 1145 |
| AD- | UUGACUUUGUUC | 3163 | 1127- | ACAUGCTGUGAAC | 3523 | 1125- |
| 1964342 | ACAGCAUGU | | 1147 | AAAGUCAAGG | | 1147 |
| AD- | CUUUGUUCACAG | 3164 | 1131- | ACCUACAUGCUGU | 3524 | 1129~ |
| 1964346 | CAUGUAGGU | | 1151 | GAACAAAGUC | | 1151 |
| AD- | CACAGCAUGUAG | 3165 | 1138- | AUCATCACCCUAC | 3525 | 1136- |
| 1964353 | GGUGAUGAU | | 1158 | AUGCUGUGAA | | 1158 |
| AD- | CAGCAUGUAGGG | 3166 | 1140- | AGCUCATCACCCU | 3526 | 1138- |
| 1964355 | UGAUGAGCU | | 1160 | ACAUGCUGUG | | 1160 |
| AD- | AGCAUGUAGGGU | 3167 | 1141- | AUGCTCAUCACCC | 3527 | 1139- |
| 1964356 | GAUGAGCAU | | 1161 | UACAUGCUGU | | 1161 |
| AD- | CAUGUAGGGUGA | 3168 | 1143- | AAGUGCTCAUCAC | 3528 | 1141- |
| 1964358 | UGAGCACUU | | 1163 | CCUACAUGCU | | 1163 |
| AD- | GACUAAAAUGCU | 3169 | 1173- | AUUAAAAGCAGCA | 3529 | 1171- |
| 1964388 | GCUUUUAAU | | 1193 | UUUUAGUCAA | | 1193 |
| AD- | AAAAUGCUGCUU | 3170 | 1177- | AUGUTUTAAAAGC | 3530 | 1175- |
| 1964392 | UUAAAACAU | | 1197 | AGCAUUUUAG | | 1197 |
| AD- | AUGCUGCUUUUA | 3171 | 1180- | ACUATGTUUUAAA | 3531 | 1178- |
| 1964395 | AAACAUAGU | | 1200 | AGCAGCAUUU | | 1200 |
| AD- | GCUGCUUUUAAA | 3172 | 1182- | AUCCTATGUUUUA | 3532 | 1180- |
| 1964397 | ACAUAGGAU | | 1202 | AAAGCAGCAU | | 1202 |
| AD- | CUGCUUUUAAAA | 3173 | 1183- | AUUCCUAUGUUUU | 3533 | 1181- |
| 1964398 | CAUAGGAAU | | 1203 | AAAAGCAGCA | | 1203 |
| AD- | UGCUUUUAAAAC | 3174 | 1184- | AUUUCCTAUGUUU | 3534 | 1182- |
| 1964399 | AUAGGAAAU | | 1204 | UAAAAGCAGC | | 1204 |
| AD- | UUUUAAAACAUA | 3175 | 1187- | AUACTUTCCUAUG | 3535 | 1185- |
| 1964402 | GGAAAGUAU | | 1207 | UUUUAAAAGC | | 1207 |
| AD- | AAACAUAGGAAA | 3176 | 1192- | ACAUTCTACUUUC | 3536 | 1190- |
| 1964407 | GUAGAAUGU | | 1212 | CUAUGUUUUA | | 1212 |
| AD- | UUGAGUGCAAAU | 3177 | 1213- | AUGCTATGGAUUU | 3537 | 1211- |
| 1964428 | CCAUAGCAU | | 1233 | GCACUCAACC | | 1233 |
| AD- | UGAGUGCAAAUC | 3178 | 1214- | AGUGCUAUGGAUU | 3538 | 1212- |
| 1964429 | CAUAGCACU | | 1234 | UGCACUCAAC | | 1234 |
| AD- | AAGAUAAAUUGA | 3179 | 1234- | AUAACUAGCUCAA | 3539 | 1232- |
| 1964449 | GCUAGUUAU | | 1254 | UUUAUCUUGU | | 1254 |
| AD- | AGAUAAAUUGAG | 3180 | 1235- | AUUAACTAGCUCA | 3540 | 1233- |
| 1964450 | CUAGUUAAU | | 1255 | AUUUAUCUUG | | 1255 |
| AD- | AAAUUGAGCUAG | 3181 | 1239- | AUGCCUTAACUAG | 3541 | 1237- |
| 1964454 | UUAAGGCAU | | 1259 | CUCAAUUUAU | | 1259 |
| AD- | AAUUGAGCUAGU | 3182 | 1240- | AUUGCCTUAACUA | 3542 | 1238- |
| 1964455 | UAAGGCAAU | | 1260 | GCUCAAUUUA | | 1260 |
| AD- | GAGCUAGUUAAG | 3183 | 1244- | AUGATUTGCCUUA | 3543 | 1242- |
| 1964459 | GCAAAUCAU | | 1264 | ACUAGCUCAA | | 1264 |
| AD- | CUAGUUAAGGCA | 3184 | 1247- | AACCTGAUUUGCC | 3544 | 1245- |
| 1964462 | AAUCAGGUU | | 1267 | UUAACUAGCU | | 1267 |
| AD- | AGUUAAGGCAAA | 3185 | 1249- | AUUACCTGAUUUG | 3545 | 1247- |
| 1964464 | UCAGGUAAU | | 1269 | CCUUAACUAG | | 1269 |
| AD- | UAAGGCAAAUCA | 3186 | 1252- | AAUUTUACCUGAU | 3546 | 1250- |
| 1964467 | GGUAAAAUU | | 1272 | UUGCCUUAAC | | 1272 |
| AD- | AAGGCAAAUCAG | 3187 | 1253- | AUAUTUTACCUGA | 3547 | 1251- |
| 1964468 | GUAAAAUAU | | 1273 | UUUGCCUUAA | | 1273 |
| AD- | GCAAAUCAGGUA | 3188 | 1256- | AGACTATUUUACC | 3548 | 1254- |
| 1964471 | AAAUAGUCU | | 1276 | UGAUUUGCCU | | 1276 |
| AD- | CAAAUCAGGUAA | 3189 | 1257- | AUGACUAUUUUAC | 3549 | 1255- |
| 1964472 | AAUAGUCAU | | 1277 | CUGAUUUGCC | | 1277 |
| AD- | AAAUCAGGUAAA | 3190 | 1258- | AAUGACTAUUUUA | 3550 | 1256- |
| 1964473 | AUAGUCAUU | | 1278 | CCUGAUUUGC | | 1278 |
| AD- | AUCAGGUAAAAU | 3191 | 1260- | AUCATGACUAUUU | 3551 | 1258- |
| 1964475 | AGUCAUGAU | | 1280 | UACCUGAUUU | | 1280 |
| AD- | CAGGUAAAAUAG | 3192 | 1262- | AAAUCATGACUAU | 3552 | 1260- |
| 1964477 | UCAUGAUUU | | 1282 | UUUACCUGAU | | 1282 |
| AD- | AGGUAAAAUAGU | 3193 | 1263- | AGAATCAUGACUA | 3553 | 1261- |
| 1964478 | CAUGAUUCU | | 1283 | UUUUACCUGA | | 1283 |
| AD- | GUAAAAUAGUCA | 3194 | 1265- | AUAGAATCAUGAC | 3554 | 1263- |
| 1964480 | UGAUUCUAU | | 1285 | UAUUUUACCU | | 1285 |
| AD- | UAAAAUAGUCAU | 3195 | 1266- | AAUAGAAUCAUGA | 3555 | 1264- |
| 1964481 | GAUUCUAUU | | 1286 | CUAUUUUACC | | 1286 |
| AD- | UCAUGAUUCUAU | 3196 | 1274- | AUACAUTACAUAG | 3556 | 1272- |
| 1964489 | GUAAUGUAU | | 1294 | AAUCAUGACU | | 1294 |
| AD- | CAUGAUUCUAUG | 3197 | 1275- | AUUACATUACAUA | 3557 | 1273- |
| 1964490 | UAAUGUAAU | | 1295 | GAAUCAUGAC | | 1295 |
| AD- | GAUUCUAUGUAA | 3198 | 1278- | AGGUTUACAUUAC | 3558 | 1276- |
| 1964493 | UGUAAACCU | | 1298 | AUAGAAUCAU | | 1298 |
| AD- | AUGACUUUUGAA | 3199 | 1407- | ACUCTGTAAUUCA | 3559 | 1405- |
| 1964551 | UUACAGAGU | | 1427 | AAAGUCAUUA | | 1427 |
| AD- | GACUUUUGAAUU | 3200 | 1409- | AAUCTCTGUAAUU | 3560 | 1407- |
| 1964553 | ACAGAGAUU | | 1429 | CAAAAGUCAU | | 1429 |
| AD- | UAUAAUUAGAGU | 3201 | 1458- | AGUATCACAACUC | 3561 | 1456- |
| 1964578 | UGUGAUACU | | 1478 | UAAUUAUAAC | | 1478 |
| AD- | UAAUUAGAGUUG | 3202 | 1460- | ACUGTATCACAAC | 3562 | 1458- |
| 1964580 | UGAUACAGU | | 1480 | UCUAAUUAUA | | 1480 |
| AD- | AAUUAGAGUUGU | 3203 | 1461- | AUCUGUAUCACAA | 3563 | 1459- |
| 1964581 | GAUACAGAU | | 1481 | CUCUAAUUAU | | 1481 |
| AD- | AUUAGAGUUGUG | 3204 | 1462- | ACUCTGTAUCACA | 3564 | 1460- |
| 1964582 | AUACAGAGU | | 1482 | ACUCUAAUUA | | 1482 |
| AD- | UAGAGUUGUGAU | 3205 | 1464- | AUACTCTGUAUCA | 3565 | 1462- |
| 1964584 | ACAGAGUAU | | 1484 | CAACUCUAAU | | 1484 |
| AD- | GAGUUGUGAUAC | 3206 | 1466- | AUAUACTCUGUAU | 3566 | 1464- |
| 1964586 | AGAGUAUAU | | 1486 | CACAACUCUA | | 1486 |
| AD- | GUUGUGAUACAG | 3207 | 1468- | AAAUAUACUCUGU | 3567 | 1466- |
| 1964588 | AGUAUAUUU | | 1488 | AUCACAACUC | | 1488 |
| AD- | CAUUCAGACAAU | 3208 | 1490- | AUAUGATAUAUUG | 3568 | 1488- |
| 1964610 | AUAUCAUAU | | 1510 | UCUGAAUGGA | | 1510 |
| AD- | AUUCAGACAAUA | 3209 | 1491- | AUUATGAUAUAUU | 3569 | 1489- |
| 1964611 | UAUCAUAAU | | 1511 | GUCUGAAUGG | | 1511 |

TABLE 10
Modified Sense and Antisense Strand Sequences of CA2 dsRNA
Agents with C16 Modification

| | | SEQ | Antisense | SEQ | mRNA Target | SEQ |
|---|---|---|---|---|---|---|
| Duplex | Sense Sequence | ID | Sequence | ID | Sequence | ID |
| Name | 5′ to 3′ | NO: | 5′ to 3′ | NO: | 5′ to 3′ | NO: |
| AD- | ascscug(Ahd)GfcAf | 3570 | asCfscuuAfugccagu | 3930 | GGACCUGAGCAC | 2834 |
| 1962343 | CfUfggcauaagsgsu | | GfcUfcagguscsc | | UGGCAUAAGGA | |
| AD- | csusgag(Chd)AfcUf | 3571 | asGfsuccUfuaugccaG | 3931 | ACCUGAGCACUG | 2781 |
| 1962345 | GfGfcauaaggascsu | | fuGfcucagsgsu | | GCAUAAGGACU | |
| AD- | usgsaca(Uhd)CfgAf | 3572 | asCfsuguAfugagugu | 3932 | GUUGACAUCGAC | 2640 |
| 1962360 | CfAfcucauacasgsu | | CfgAfugucasasc | | ACUCAUACAGC | |
| AD- | csascuc(Ahd)UfaCf | 3573 | asCfsauaCfuuggcug | 3933 | GACACUCAUACA | 2652 |
| 1962369 | AfGfccaaguausgsu | | UfaUfgagugsusc | | GCCAAGUAUGA | |
| AD- | ascsuca(Uhd)AfcAf | 3574 | asUfscauAfcuuggcu | 3934 | ACACUCAUACAG | 2637 |
| 1962370 | GfCfcaaguaugsasu | | GfuAfugagusgsu | | CCAAGUAUGAC | |
| AD- | csuscau(Ahd)CfaGf | 3575 | asGfsucaUfacuuggc | 3935 | CACUCAUACAGC | 2691 |
| 1962371 | CfCfaaguaugascsu | | UfgUfaugagsusg | | CAAGUAUGACC | |
| AD- | cscsaag(Uhd)AfuGf | 3576 | asCfsaggGfaaggguc | 3936 | AGCCAAGUAUGA | 2710 |
| 1962380 | AfCfccuucccusgsu | | AfuAfcuuggscsu | | CCCUUCCCUGA | |
| AD- | csusgag(Ghd)AfuCf | 3577 | asCfscauUfguugagg | 3937 | CCCUGAGGAUCC | 2759 |
| 1962416 | CfUfcaacaaugsgsu | | AfuCfcucagsgsg | | UCAACAAUGGU | |
| AD- | usgsagg(Ahd)UfcCf | 3578 | asAfsccaUfuguugag | 3938 | CCUGAGGAUCCU | 2717 |
| 1962417 | UfCfaacaauggsusu | | GfaUfccucasgsg | | CAACAAUGGUC | |
| AD- | gsasgga(Uhd)CfcUf | 3579 | asGfsaccAfuuguuga | 3939 | CUGAGGAUCCUC | 2703 |
| 1962418 | CfAfacaaugguscsu | | GfgAfuccucsasg | | AACAAUGGUCA | |
| AD- | usgscuu(Uhd)CfaAf | 3580 | asCfsaaaCfuccacguU | 3940 | CAUGCUUUCAAC | 2625 |
| 1962439 | CfGfuggaguuusgsu | | fgAfaagcasusg | | GUGGAGUUUGA | |
| AD- | gscsuuu(Chd)AfaCf | 3581 | asUfscaaAfcuccacgU | 3941 | AUGCUUUCAACG | 2624 |
| 1962440 | GfUfggaguuugsasu | | fuGfaaagcsasu | | UGGAGUUUGAU | |
| AD- | csusuuc(Ahd)AfcGf | 3582 | asAfsucaAfacuccacG | 3942 | UGCUUUCAACGU | 2634 |
| 1962441 | UfGfgaguuugasusu | | fuUfgaaagscsa | | GGAGUUUGAUG | |
| AD- | ususuca(Ahd)CfgUf | 3583 | asCfsaucAfaacuccaC | 3943 | GCUUUCAACGUG | 2650 |
| 1962442 | GfGfaguuugausgsu | | fgUfugaaasgsc | | GAGUUUGAUGA | |
| AD- | gsgsagu(Uhd)UfgAf | 3584 | asCfscugAfgagucauC | 3944 | GUGGAGUUUGAU | 2725 |
| 1962451 | UfGfacucucagsgsu | | faAfacuccsasc | | GACUCUCAGGA | |
| AD- | usgsacu(Chd)UfcAf | 3585 | asCfsugcUfuuguccu | 3945 | GAUGACUCUCAG | 2787 |
| 1962460 | GfGfacaaagcasgsu | | GfaGfagucasusc | | GACAAAGCAGU | |
| AD- | asascuu(Chd)AfcUf | 3586 | asCfscagUfgaaccaaG | 3946 | AGAACUUCACUU | 2721 |
| 1962557 | UfGfguucacugsgsu | | fuGfaaguuscsu | | GGUUCACUGGA | |
| AD- | csusgau(Ghd)GfaCf | 3587 | asUfsagaAfcggccagU | 3947 | ACCUGAUGGACU | 2838 |
| 1962597 | UfGfgccguucusasu | | fcCfaucagsgsu | | GGCCGUUCUAG | |
| AD- | usgsaug(Ghd)AfcUf | 3588 | asCfsuagAfacggccaG | 3948 | CCUGAUGGACUG | 2843 |
| 1962598 | GfGfccguucuasgsu | | fuCfcaucasgsg | | GCCGUUCUAGG | |
| AD- | gsasugg(Ahd)CfuGf | 3589 | asCfscuaGfaacggccA | 3949 | CUGAUGGACUGG | 2841 |
| 1962599 | GfCfcguucuagsgsu | | fgUfccaucsasg | | CCGUUCUAGGU | |
| AD- | asusgga(Chd)UfgGf | 3590 | asAfsccuAfgaacggcC | 3950 | UGAUGGACUGGC | 2833 |
| 1962600 | CfCfguucuaggsusu | | faGfuccauscsa | | CGUUCUAGGUA | |
| AD- | gsascug(Ghd)CfcGf | 3591 | asAfsauaCfcuagaacG | 3951 | UGGACUGGCCGU | 2776 |
| 1962603 | UfUfcuagguaususu | | fgCfcagucscsa | | UCUAGGUAUUU | |
| AD- | ascsugg(Chd)CfgUf | 3592 | asAfsaauAfccuagaaC | 3952 | GGACUGGCCGUU | 2751 |
| 1962604 | UfCfuagguauususu | | fgGfccaguscsc | | CUAGGUAUUUU | |
| AD- | csusggc(Chd)GfuUf | 3593 | asAfsaaaUfaccuagaA | 3953 | GACUGGCCGUUC | 2646 |
| 1962605 | CfUfagguauuususu | | fcGfgccagsusc | | UAGGUAUUUUU | |
| AD- | usgsgcc(Ghd)UfuCf | 3594 | asAfsaaaAfuaccuagA | 3954 | ACUGGCCGUUCU | 2673 |
| 1962606 | UfAfgguauuuususu | | faCfggccasgsu | | AGGUAUUUUUU | |
| AD- | gsgsccg(Uhd)UfcUf | 3595 | asAfsaaaAfauaccuaG | 3955 | CUGGCCGUUCUA | 2700 |
| 1962607 | AfGfguauuuuususu | | faAfcggccsasg | | GGUAUUUUUUU | |
| AD- | gscscgu(Uhd)CfuAf | 3596 | asAfsaaaAfaauaccuA | 3956 | UGGCCGUUCUAG | 2681 |
| 1962608 | GfGfuauuuuuususu | | fgAfacggcscsa | | GUAUUUUUUUG | |
| AD- | cscsguu(Chd)UfaGf | 3597 | asCfsaaaAfaaauaccU | 3957 | GGCCGUUCUAGG | 2662 |
| 1962609 | GfUfauuuuuuusgsu | | faGfaacggscsc | | UAUUUUUUUGA | |
| AD- | csgsuuc(Uhd)AfgGf | 3598 | asUfscaaAfaaaauacC | 3958 | GCCGUUCUAGGU | 2606 |
| 1962610 | UfAfuuuuuuugsasu | | fuAfgaacgsgsc | | AUUUUUUUGAA | |
| AD- | gsusucu(Ahd)GfgUf | 3599 | asUfsucaAfaaaaauaC | 3959 | CCGUUCUAGGUA | 2586 |
| 1962611 | AfUfuuuuuugasasu | | fcUfagaacsgsg | | UUUUUUUGAAG | |
| AD- | ususcua(Ghd)GfuAf | 3600 | asCfsuucAfaaaaaauA | 3960 | CGUUCUAGGUAU | 2607 |
| 1962612 | UfUfuuuuugaasgsu | | fcCfuagaascsg | | UUUUUUGAAGG | |
| AD- | uscsuag(Ghd)UfaUf | 3601 | asCfscuuCfaaaaaaaU | 3961 | GUUCUAGGUAUU | 2679 |
| 1962613 | UfUfuuuugaagsgsu | | faCfcuagasasc | | UUUUUGAAGGU | |
| AD- | usasggu(Ahd)UfuUf | 3602 | asAfsaccUfucaaaaaA | 3962 | UCUAGGUAUUUU | 2642 |
| 1962615 | UfUfuugaaggususu | | faUfaccuasgsa | | UUUGAAGGUUG | |
| AD- | asgsgua(Uhd)UfuUf | 3603 | asCfsaacCfuucaaaaA | 3963 | CUAGGUAUUUUU | 2738 |
| 1962616 | UfUfugaagguusgsu | | faAfuaccusasg | | UUGAAGGUUGG | |
| AD- | gsgsuau(Uhd)UfuUf | 3604 | asCfscaaCfcuucaaaA | 3964 | UAGGUAUUUUUU | 2731 |
| 1962617 | UfUfgaagguugsgsu | | faAfauaccsusa | | UGAAGGUUGGC | |
| AD- | gsusauu(Uhd)UfuUf | 3605 | asGfsccaAfccuucaaA | 3965 | AGGUAUUUUUUU | 2789 |
| 1962618 | UfGfaagguuggscsu | | faAfaauacscsu | | GAAGGUUGGCA | |
| AD- | asusuuu(Uhd)UfuGf | 3606 | asCfsugcCfaaccuucA | 3966 | GUAUUUUUUUGA | 2807 |
| 1962620 | AfAfgguuggcasgsu | | faAfaaaausasc | | AGGUUGGCAGC | |
| AD- | csgsggc(Chd)UfuCf | 3607 | asAfsacaAfcuuucug | 3967 | ACCGGGCCUUCA | 2701 |
| 1962648 | AfGfaaagungususu | | AfaGfgcccgsgsu | | GAAAGUUGUUG | |
| AD- | gsgsgcc(Uhd)UfcAf | 3608 | asCfsaacAfacuuucuG | 3968 | CCGGGCCUUCAG | 2726 |
| 1962649 | GfAfaaguuguusgsu | | faAfggcccsgsg | | AAAGUUGUUGA | |
| AD- | gsgsccu(Uhd)CfaGf | 3609 | asUfscaaCfaacuuucU | 3969 | CGGGCCUUCAGA | 2712 |
| 1962650 | AfAfaguuguugsasu | | fcAfaggccscsg | | AAGUUGUUGAU | |
| AD- | cscsuuc(Ahd)GfaAf | 3610 | asCfsaucAfacaacuuU | 3970 | GGCCUUCAGAAA | 2756 |
| 1962652 | AfGfuuguugausgsu | | fcUfgaaggscsc | | GUUGUUGAUGU | |
| AD- | csusuca(Ghd)AfaAf | 3611 | asAfscauCfaacaacuU | 3971 | GCCUUCAGAAAG | 2696 |
| 1962653 | GfUfuguugaugsusu | | fuCfugaagsgsc | | UUGUUGAUGUG | |
| AD- | uscsaga(Ahd)AfgUf | 3612 | asGfscacAfucaacaaC | 3972 | CUUCAGAAAGUU | 2795 |
| 1962655 | UfGfuugaugugscsu | | fuUfucugasasg | | GUUGAUGUGCU | |
| AD- | gsasaag(Uhd)UfgUf | 3613 | asCfscagCfacaucaaC | 3973 | CAGAAAGUUGUU | 2820 |
| 1962658 | UfGfaugugcugsgsu | | faAfcuuucsusg | | GAUGUGCUGGA | |
| AD- | asusucc(Ahd)UfuAf | 3614 | asGfscccUfuuguuuu | 3974 | GGAUUCCAUUAA | 2729 |
| 1962678 | AfAfacaaagggscsu | | AfaUfggaauscsc | | AACAAAGGGCA | |
| AD- | asascaa(Ahd)GfgGf | 3615 | asCfsagcAfcucuugcC | 3975 | AAAACAAAGGGC | 2821 |
| 1962688 | CfAfagagugcusgsu | | fcUfuuguususu | | AAGAGUGCUGA | |
| AD- | asgsugc(Uhd)GfaCf | 3616 | asAfsaguUfagugaag | 3976 | AGAGUGCUGACU | 2599 |
| 1962701 | UfUfcacuaacususu | | UfcAfgcacuscsu | | UCACUAACUUC | |
| AD- | usgscug(Ahd)CfuUf | 3617 | asCfsgaaGfuuaguga | 3977 | AGUGCUGACUUC | 2583 |
| 1962703 | CfAfcuaacuucsgsu | | AfgUfcagcascsu | | ACUAACUUCGA | |
| AD- | csusgac(Uhd)UfcAf | 3618 | asAfsucgAfaguuagu | 3978 | UGCUGACUUCAC | 2562 |
| 1962705 | CfUfaacuucgasusu | | GfaAfgucagscsa | | UAACUUCGAUC | |
| AD- | usgsacu(Uhd)CfaCf | 3619 | asGfsaucGfaaguuag | 3979 | GCUGACUUCACU | 2542 |
| 1962706 | UfAfacuucgauscsu | | UfgAfagucasgsc | | AACUUCGAUCC | |
| AD- | gsascuu(Chd)AfcUf | 3620 | asGfsgauCfgaaguua | 3980 | CUGACUUCACUA | 2551 |
| 1962707 | AfAfcuucgaucscsu | | GfuGfaagucsasg | | ACUUCGAUCCU | |
| AD- | csascua(Ahd)CfuUf | 3621 | asCfsacgAfggaucgaA | 3981 | UUCACUAACUUC | 2601 |
| 1962712 | CfGfauccucgusgsu | | fgUfuagugsasa | | GAUCCUCGUGG | |
| AD- | ascsuaa(Chd)UfuCf | 3622 | asCfscacGfaggaucgA | 3982 | UCACUAACUUCG | 2755 |
| 1962713 | GfAfuccucgugsgsu | | faGfuuagusgsa | | AUCCUCGUGGC | |
| AD- | cscsucc(Uhd)UfcCf | 3623 | asCfscaaGfgauucagG | 3983 | GGCCUCCUUCCU | 2629 |
| 1962733 | UfGfaauccuugsgsu | | faAfggaggscsc | | GAAUCCUUGGA | |
| AD- | uscscuu(Chd)CfuGf | 3624 | asAfsuccAfaggauuc | 3984 | CCUCCUUCCUGA | 2608 |
| 1962735 | AfAfuccuuggasusu | | AfgGfaaggasgsg | | AUCCUUGGAUU | |
| AD- | cscsuuc(Chd)UfgAf | 3625 | asAfsaucCfaaggauuC | 3985 | CUCCUUCCUGAA | 2611 |
| 1962736 | AfUfccuuggaususu | | faGfgaaggsasg | | UCCUUGGAUUA | |
| AD- | csusccu(Chd)UfuCf | 3626 | asCfsacaCfauuccagA | 3986 | CCCUCCUCUUCU | 2623 |
| 1962766 | UfGfgaaugugusgsu | | faGfaggagsgsg | | GGAAUGUGUGA | |
| AD- | gsasaug(Uhd)GfuGf | 3627 | asAfscaaUfccaggucA | 3987 | UGGAAUGUGUGA | 2816 |
| 1962777 | AfCfcuggauugsusu | | fcAfcauucscsa | | CCUGGAUUGUG | |
| AD- | usgsugu(Ghd)AfcCf | 3628 | asAfsgcaCfaauccagG | 3988 | AAUGUGUGACCU | 2805 |
| 1962780 | UfGfgauugugcsusu | | fuCfacacasusu | | GGAUUGUGCUC | |
| AD- | gsusgcu(Chd)AfaGf | 3629 | asCfsugaUfggguucc | 3989 | UUGUGCUCAAGG | 2766 |
| 1962795 | GfAfacccaucasgsu | | UfuGfagcacsasa | | AACCCAUCAGC | |
| AD- | uscsaag(Ghd)AfaCf | 3630 | asGfsacgCfugauggg | 3990 | GCUCAAGGAACC | 2794 |
| 1962799 | CfCfaucagcguscsu | | UfuCfcuugasgsc | | CAUCAGCGUCA | |
| AD- | asasgga(Ahd)CfcCf | 3631 | asCfsugaCfgcugaug | 3991 | UCAAGGAACCCA | 2811 |
| 1962801 | AfUfcagcgucasgsu | | GfgUfuccuusgsa | | UCAGCGUCAGC | |
| AD- | cscsauc(Ahd)GfcGf | 3632 | asCfsucgCfugcugacG | 3992 | ACCCAUCAGCGU | 2835 |
| 1962808 | UfCfagcagcgasgsu | | fcUfgauggsgsu | | CAGCAGCGAGC | |
| AD- | gsasaau(Uhd)CfcGf | 3633 | asAfsguuAfaguuuac | 3993 | UUGAAAUUCCGU | 2584 |
| 1962836 | UfAfaacuuaacsusu | | GfgAfauuucsasa | | AAACUUAACUU | |
| AD- | asasauu(Chd)CfgUf | 3634 | asAfsaguUfaaguuua | 3994 | UGAAAUUCCGUA | 2559 |
| 1962837 | AfAfacuuaacususu | | CfgGfaauuuscsa | | AACUUAACUUC | |
| AD- | cscsgua(Ahd)AfcUf | 3635 | asCfsauuGfaaguuaaG | 3995 | UUCCGUAAACUU | 2556 |
| 1962842 | UfAfacuucaausgsu | | fuUfuacggsasa | | AACUUCAAUGG | |
| AD- | csgsuaa(Ahd)CfuUf | 3636 | asCfscauUfgaaguuaA | 3996 | UCCGUAAACUUA | 2659 |
| 1962843 | AfAfcuucaaugsgsu | | fgUfuuacgsgsa | | ACUUCAAUGGG | |
| AD- | asascug(Ahd)UfgGf | 3637 | asCfscagUfuguccacC | 3997 | AGAACUGAUGGU | 2844 |
| 1962860 | UfGfgacaacugsgsu | | faUfcaguuscsu | | GGACAACUGGC | |
| AD- | csuscag(Chd)CfaCf | 3638 | asCfscugUfucuucag | 3998 | AGCUCAGCCACU | 2799 |
| 1962885 | UfGfaagaacagsgsu | | UfgGfcugagscsu | | GAAGAACAGGC | |
| AD- | asgsaac(Ahd)GfgCf | 3639 | asAfsgcuUfugauuug | 3999 | GAAGAACAGGCA | 2749 |
| 1962897 | AfAfaucaaagcsusu | | CfcUfguucususc | | AAUCAAAGCUU | |
| AD- | asgsgca(Ahd)AfuCf | 3640 | asAfsaggAfagcuuug | 4000 | ACAGGCAAAUCA | 2567 |
| 1962902 | AfAfagcuuccususu | | AfuUfugccusgsu | | AAGCUUCCUUC | |
| AD- | csasaag(Chd)UfuCf | 3641 | asCfsuuaUfuugaagg | 4001 | AUCAAAGCUUCC | 2543 |
| 1962910 | CfUfucaaauaasgsu | | AfaGfcuuugsasu | | UUCAAAUAAGA | |
| AD- | asasagc(Uhd)UfcCf | 3642 | asUfscuuAfuuugaag | 4002 | UCAAAGCUUCCU | 2569 |
| 1962911 | UfUfcaaauaagsasu | | GfaAfgcuuusgsa | | UCAAAUAAGAU | |
| AD- | asasgcu(Uhd)CfcUf | 3643 | asAfsucuUfauuugaa | 4003 | CAAAGCUUCCUU | 2558 |
| 1962912 | UfCfaaauaagasusu | | GfgAfagcuususg | | CAAAUAAGAUG | |
| AD- | asgscuu(Chd)CfuUf | 3644 | asCfsaucUfuauuuga | 4004 | AAAGCUUCCUUC | 2565 |
| 1962913 | CfAfaauaagausgsu | | AfgGfaagcususu | | AAAUAAGAUGG | |
| AD- | gscsuuc(Chd)UfuCf | 3645 | asCfscauCfuuauuug | 4005 | AAGCUUCCUUCA | 2563 |
| 1962914 | AfAfauaagaugsgsu | | AfaGfgaagcsusu | | AAUAAGAUGGU | |
| AD- | gsuscug(Uhd)AfuCf | 3646 | asUfsucaUfuauuugg | 4006 | UAGUCUGUAUCC | 2545 |
| 1962941 | CfAfaauaaugasasu | | AfuAfcagacsusa | | AAAUAAUGAAU | |
| AD- | gsusauc(Chd)AfaAf | 3647 | asAfsagaUfucauuau | 4007 | CUGUAUCCAAAU | 2561 |
| 1962945 | UfAfaugaaucususu | | UfuGfgauacsasg | | AAUGAAUCUUC | |
| AD- | asuscca(Ahd)AfuAf | 3648 | asCfsgaaGfauucauuA | 4008 | GUAUCCAAAUAA | 2614 |
| 1962947 | AfUfgaaucuncsgsu | | fuUfuggausasc | | UGAAUCUUCGG | |
| AD- | uscscaa(Ahd)UfaAf | 3649 | asCfscgaAfgauucauU | 4009 | UAUCCAAAUAAU | 2732 |
| 1962948 | UfGfaaucuucgsgsu | | faUfuuggasusa | | GAAUCUUCGGG | |
| AD- | cscsaaa(Uhd)AfaUf | 3650 | asCfsccgAfagauucaU | 4010 | AUCCAAAUAAUG | 2796 |
| 1962949 | GfAfaucuucggsgsu | | fuAfuuuggsasu | | AAUCUUCGGGU | |
| AD- | csasaau(Ahd)AfuGf | 3651 | asAfscccGfaagauucA | 4011 | UCCAAAUAAUGA | 2743 |
| 1962950 | AfAfucuucgggsusu | | fuUfauuugsgsa | | AUCUUCGGGUG | |
| AD- | asasaua(Ahd)UfgAf | 3652 | asCfsaccCfgaaganuC | 4012 | CCAAAUAAUGAA | 2815 |
| 1962951 | AfUfcuucgggusgsu | | faUfuauuusgsg | | UCUUCGGGUGU | |
| AD- | asasuaa(Uhd)GfaAf | 3653 | asAfscacCfcgaagauU | 4013 | CAAAUAAUGAAU | 2806 |
| 1962952 | UfCfuucgggugsusu | | fcAfuuauususg | | CUUCGGGUGUU | |
| AD- | asusaau(Ghd)AfaUf | 3654 | asAfsacaCfccgaagaU | 4014 | AAAUAAUGAAUC | 2801 |
| 1962953 | CfUfucgggugususu | | fuCfauuaususu | | UUCGGGUGUUU | |
| AD- | usasaug(Ahd)AfuCf | 3655 | asAfsaacAfcccgaagA | 4015 | AAUAAUGAAUCU | 2809 |
| 1962954 | UfUfcggguguususu | | fuUfcauuasusu | | UCGGGUGUUUC | |
| AD- | usgsaau(Chd)UfuCf | 3656 | asGfsggaAfacacccgA | 4016 | AAUGAAUCUUCG | 2739 |
| 1962957 | GfGfguguuuccscsu | | faGfauucasusu | | GGUGUUUCCCU | |
| AD- | gsasauc(Uhd)UfcGf | 3657 | asAfsgggAfaacacccG | 4017 | AUGAAUCUUCGG | 2747 |
| 1962958 | GfGfuguuucccsusu | | faAfgauucsasu | | GUGUUUCCCUU | |
| AD- | asasgca(Chd)AfgAf | 3658 | asAfsccaAfgguagauC | 4018 | CUAAGCACAGAU | 2671 |
| 1962984 | UfCfuaccuuggsusu | | fuGfugcuusasg | | CUACCUUGGUG | |
| AD- | asgscac(Ahd)GfaUf | 3659 | asCfsaccAfagguagaU | 4019 | UAAGCACAGAUC | 2680 |
| 1962985 | CfUfaccuuggusgsu | | fcUfgugcususa | | UACCUUGGUGA | |
| AD- | gscsaca(Ghd)AfuCf | 3660 | asUfscacCfaagguagA | 4020 | AAGCACAGAUCU | 2633 |
| 1962986 | UfAfccuuggugsasu | | fuCfugugcsusu | | ACCUUGGUGAU | |
| AD- | asgsauc(Uhd)AfcCf | 3661 | asCfsaaaUfcaccaagG | 4021 | ACAGAUCUACCU | 2616 |
| 1962990 | UfUfggugauuusgsu | | fuAfgaucusgsu | | UGGUGAUUUGG | |
| AD- | ascsaac(Uhd)GfcUf | 3662 | asCfsaacCfagccacaGf | 4022 | ACACAACUGCUG | 2845 |
| 1963114 | GfUfggcugguusgsu | | cAfguugusgsu | | UGGCUGGUUGG | |
| AD- | csasacu(Ghd)CfuGf | 3663 | asCfscaaCfcagccacAf | 4023 | CACAACUGCUGU | 2847 |
| 1963115 | UfGfgcugguugsgsu | | gCfaguugsusg | | GGCUGGUUGGU | |
| AD- | csusgcu(Ghd)UfgGf | 3664 | asGfscacCfaaccagcCf | 4024 | AACUGCUGUGGC | 2849 |
| 1963118 | CfUfgguuggugscsu | | aCfagcagsusu | | UGGUUGGUGCU | |
| AD- | gsusggc(Uhd)GfgUf | 3665 | asAfscaaAfgcaccaaC | 4025 | CUGUGGCUGGUU | 2810 |
| 1963123 | UfGfgugcuuugsusu | | fcAfgccacsasg | | GGUGCUUUGUU | |
| AD- | gsgscug(Ghd)UfuGf | 3666 | asAfsaacAfaagcaccA | 4026 | GUGGCUGGUUGG | 2769 |
| 1963125 | GfUfgcuuuguususu | | faCfcagccsasc | | UGCUUUGUUUA | |
| AD- | gscsugg(Uhd)UfgGf | 3667 | asUfsaaaCfaaagcacCf | 4027 | UGGCUGGUUGGU | 2753 |
| 1963126 | UfGfcuuuguuusasu | | aAfccagcscsa | | GCUUUGUUUAU | |
| AD- | csusggu(Uhd)GfgUf | 3668 | asAfsuaaAfcaaagcaC | 4028 | GGCUGGUUGGUG | 2686 |
| 1963127 | GfCfuuuguuuasusu | | fcAfaccagscsc | | CUUUGUUUAUG | |
| AD- | usgsguu(Ghd)GfuGf | 3669 | asCfsauaAfacaaagcA | 4029 | GCUGGUUGGUGC | 2690 |
| 1963128 | CfUfuuguuuausgsu | | fcCfaaccasgsc | | UUUGUUUAUGG | |
| AD- | gsgsuug(Ghd)UfgCf | 3670 | asCfscauAfaacaaagC | 4030 | CUGGUUGGUGCU | 2737 |
| 1963129 | UfUfuguuuaugsgsu | | faCfcaaccsasg | | UUGUUUAUGGU | |
| AD- | gsusugg(Uhd)GfcUf | 3671 | asAfsccaUfaaacaaaG | 4031 | UGGUUGGUGCUU | 2746 |
| 1963130 | UfUfguuuauggsusu | | fcAfccaacscsa | | UGUUUAUGGUA | |
| AD- | ususggu(Ghd)CfuUf | 3672 | asUfsaccAfuaaacaaA | 4032 | GGUUGGUGCUUU | 2651 |
| 1963131 | UfGfuuuauggusasu | | fgCfaccaascsc | | GUUUAUGGUAG | |
| AD- | usgsgug(Chd)UfuUf | 3673 | asCfsuacCfauaaacaA | 4033 | GUUGGUGCUUUG | 2643 |
| 1963132 | GfUfuuaugguasgsu | | faGfcaccasasc | | UUUAUGGUAGU | |
| AD- | usgscuu(Uhd)GfuUf | 3674 | asCfsuacUfaccauaaA | 4034 | GGUGCUUUGUUU | 2684 |
| 1963135 | UfAfugguaguasgsu | | fcAfaagcascsc | | AUGGUAGUAGU | |
| AD- | ususugu(Uhd)UfaUf | 3675 | asAfsaacUfacuaccaU | 4035 | GCUUUGUUUAUG | 2723 |
| 1963138 | GfGfuaguaguususu | | faAfacaaasgsc | | GUAGUAGUUUU | |
| AD- | ususguu(Uhd)AfuGf | 3676 | asAfsaaaCfuacuaccA | 4036 | CUUUGUUUAUGG | 2773 |
| 1963139 | GfUfaguaguuususu | | fuAfaacaasasg | | UAGUAGUUUUU | |
| AD- | gsusuua(Uhd)GfgUf | 3677 | asGfsaaaAfacuacuaC | 4037 | UUGUUUAUGGUA | 2760 |
| 1963140 | AfGfuaguuuuuscsu | | fcAfuaaacsasa | | GUAGUUUUUCU | |
| AD- | ususuau(Ghd)GfuAf | 3678 | asAfsgaaAfaacuacuA | 4038 | UGUUUAUGGUAG | 2663 |
| 1963141 | GfUfaguuuuucsusu | | fcCfauaaascsa | | UAGUUUUUCUG | |
| AD- | ususaug(Ghd)UfaGf | 3679 | asCfsagaAfaaacuacU | 4039 | GUUUAUGGUAGU | 2720 |
| 1963142 | UfAfguuuuucusgsu | | faCfcauaasasc | | AGUUUUUCUGU | |
| AD- | usasugg(Uhd)AfgUf | 3680 | asAfscagAfaaaacuaC | 4040 | UUUAUGGUAGUA | 2675 |
| 1963143 | AfGfuuuuucugsusu | | fuAfccauasasa | | GUUUUUCUGUA | |
| AD- | asusggu(Ahd)GfuAf | 3681 | asUfsacaGfaaaaacuA | 4041 | UUAUGGUAGUAG | 2617 |
| 1963144 | GfUfuuuucugusasu | | fcUfaccausasa | | UUUUUCUGUAA | |
| AD- | usasgua(Ghd)UfuUf | 3682 | asGfsuguUfacagaaaA | 4042 | GGUAGUAGUUUU | 2740 |
| 1963148 | UfUfcuguaacascsu | | faCfuacuascsc | | UCUGUAACACA | |
| AD- | asgsaau(Ahd)AfaGf | 3683 | asAfsaguCfaagguacU | 4043 | UAAGAAUAAAGU | 2572 |
| 1963202 | UfAfccuugacususu | | fuUfauucususa | | ACCUUGACUUU | |
| AD- | asasuaa(Ahd)GfuAf | 3684 | asCfsaaaGfucaagguA | 4044 | AGAAUAAAGUAC | 2706 |
| 1963204 | CfCfuugacuuusgsu | | fcUfunauuscsu | | CUUGACUUUGU | |
| AD- | asusaaa(Ghd)UfaCf | 3685 | asAfscaaAfgucaaggU | 4045 | GAAUAAAGUACC | 2653 |
| 1963205 | CfUfugacuuugsusu | | faCfuuuaususc | | UUGACUUUGUU | |
| AD- | usasaag(Uhd)AfcCf | 3686 | asAfsacaAfagucaagG | 4046 | AAUAAAGUACCU | 2595 |
| 1963206 | UfUfgacuuugususu | | fuAfcuuuasusu | | UGACUUUGUUC | |
| AD- | asasagu(Ahd)CfcUf | 3687 | asGfsaacAfaagucaaG | 4047 | AUAAAGUACCUU | 2603 |
| 1963207 | UfGfacuuuguuscsu | | fcUfacuuusasu | | GACUUUGUUCA | |
| AD- | asasgua(Chd)CfuUf | 3688 | asUfsgaaCfaaagucaA | 4048 | UAAAGUACCUUG | 2579 |
| 1963208 | GfAfcuuuguucsasu | | fgGfuacuususa | | ACUUUGUUCAC | |
| AD- | usasccu(Uhd)GfaCf | 3689 | asCfsuguGfaacaaagU | 4049 | AGUACCUUGACU | 2667 |
| 1963211 | UfUfuguucacasgsu | | fcAfagguascsu | | UUGUUCACAGC | |
| AD- | ascsuuu(Ghd)UfuCf | 3690 | asCfsuacAfugcugug | 4050 | UGACUUUGUUCA | 2672 |
| 1963218 | AfCfagcauguasgsu | | AfaCfaaaguscsa | | CAGCAUGUAGG | |
| AD- | csusuug(Uhd)UfcAf | 3691 | asCfscuaCfaugcuguG | 4051 | GACUUUGUUCAC | 2707 |
| 1963219 | CfAfgcauguagsgsu | | faAfcaaagsusc | | AGCAUGUAGGG | |
| AD- | ususugu(Uhd)CfaCf | 3692 | asCfsccuAfcaugcugU | 4052 | ACUUUGUUCACA | 2744 |
| 1963220 | AfGfcauguaggsgsu | | fcAfacaaasgsu | | GCAUGUAGGGU | |
| AD- | ususguu(Chd)AfcAf | 3693 | asAfscccUfacaugcuG | 4053 | CUUUGUUCACAG | 2770 |
| 1963221 | GfCfauguagggsusu | | fuGfaacaasasg | | CAUGUAGGGUG | |
| AD- | usgsuuc(Ahd)CfaGf | 3694 | asCfsaccCfuacaugcU | 4054 | UUUGUUCACAGC | 2803 |
| 1963222 | CfAfuguagggusgsu | | fcUfgaacasasa | | AUGUAGGGUGA | |
| AD- | uscsaca(Ghd)CfaUf | 3695 | asCfsaucAfcccuacaU | 4055 | GUUCACAGCAUG | 2779 |
| 1963225 | GfUfagggugausgsu | | fgCfugugasasc | | UAGGGUGAUGA | |
| AD- | csasacg(Ghd)AfcCf | 3696 | asGfsccdAg(Tgn)gcu | 4056 | CACAACGGACCU | 2846 |
| 1963237 | UfGfagcacuggscsu | | cagGfuCfcguugsusg | | GAGCACUGGCA | |
| AD- | ascsgga(Chd)CfuGf | 3697 | asAfsugdCc(Agn)gu | 4057 | CAACGGACCUGA | 2825 |
| 1963239 | AfGfcacuggcasusu | | gcucAfgGfuccgususg | | GCACUGGCAUA | |
| AD- | cscsuga(Ghd)CfaCf | 3698 | asUfsccdTu(Agn)ugc | 4058 | GACCUGAGCACU | 2822 |
| 1963244 | UfGfgcauaaggsasu | | cagUfgCfucaggsusc | | GGCAUAAGGAC | |
| AD- | csusgag(Chd)AfcUf | 3699 | asGfsucdCu(Tgn)aug | 4059 | ACCUGAGCACUG | 2781 |
| 1963245 | GfGfcauaaggascsu | | ccaGfuGfcucagsgsu | | GCAUAAGGACU | |
| AD- | usgsagc(Ahd)CfuGf | 3700 | asAfsgudCc(Tgn)uau | 4060 | CCUGAGCACUGG | 2757 |
| 1963246 | GfCfauaaggacsusu | | gccAfgUfgcucasgsg | | CAUAAGGACUU | |
| AD- | gscsacu(Ghd)GfcAf | 3701 | asGfsgadAg(Tgn)ccu | 4061 | GAGCACUGGCAU | 2693 |
| 1963249 | UfAfaggacuucscsu | | uauGfcCfagugcsusc | | AAGGACUUCCC | |
| AD- | gsascua(Ahd)AfaUf | 3702 | asUfsuaaAfagcagcaU | 4062 | UUGACUAAAAUG | 2609 |
| 1963287 | GfCfugcuuuuasasu | | fuUfuagucsasa | | CUGCUUUUAAA | |
| AD- | ascsuaa(Ahd)AfuGf | 3703 | asUfsuuaAfaagcagcA | 4063 | UGACUAAAAUGC | 2677 |
| 1963288 | CfUfgcuuuuaasasu | | fuUfuuaguscsa | | UGCUUUUAAAA | |
| AD- | csusaaa(Ahd)UfgCf | 3704 | asUfsuuuAfaaagcagC | 4064 | GACUAAAAUGCU | 2682 |
| 1963289 | UfGfcuuuuaaasasu | | faUfuuuagsusc | | GCUUUUAAAAC | |
| AD- | usasaaa(Uhd)GfcUf | 3705 | asGfsuuuUfaaaagcaG | 4065 | ACUAAAAUGCUG | 2570 |
| 1963290 | GfCfuuuuaaaascsu | | fcAfuuuuasgsu | | CUUUUAAAACA | |
| AD- | usgscug(Chd)UfuUf | 3706 | asCfscuaUfguuuuaa | 4066 | AAUGCUGCUUUU | 2566 |
| 1963295 | UfAfaaacauagsgsu | | AfaGfcagcasusu | | AAAACAUAGGA | |
| AD- | gscsugc(Uhd)UfuUf | 3707 | asUfsccuAfuguuuua | 4067 | AUGCUGCUUUUA | 2597 |
| 1963296 | AfAfaacauaggsasu | | AfaAfgcagcsasu | | AAACAUAGGAA | |
| AD- | ususuaa(Ahd)AfcAf | 3708 | asCfsuacUfuuccuauG | 4068 | CUUUUAAAACAU | 2772 |
| 1963302 | UfAfggaaaguasgsu | | fuUfuuaaasasg | | AGGAAAGUAGA | |
| AD- | csusguu(Ghd)AfcAf | 3709 | asAfsugdAg(Tgn)guc | 4069 | CCCUGUUGACAU | 2592 |
| 1963306 | UfCfgacacucasusu | | gauGfuCfaacagsgsg | | CGACACUCAUA | |
| AD- | gsusuga(Chd)AfuCf | 3710 | asGfsuadTg(Agn)gug | 4070 | CUGUUGACAUCG | 2578 |
| 1963308 | GfAfcacucauascsu | | ucgAfuGfucaacsasg | | ACACUCAUACA | |
| AD- | gsascau(Chd)GfaCf | 3711 | asGfscudGu(Agn)ug | 4071 | UUGACAUCGACA | 2657 |
| 1963311 | AfCfucauacagscsu | | agugUfcGfaugucsasa | | CUCAUACAGCC | |
| AD- | ascsauc(Ghd)AfcAf | 3712 | asGfsgcdTg(Tgn)aug | 4072 | UGACAUCGACAC | 2762 |
| 1963312 | CfUfcauacagcscsu | | aguGfuCfgauguscsa | | UCAUACAGCCA | |
| AD- | asuscga(Chd)AfcUf | 3713 | asUfsugdGc(Tgn)gua | 4073 | ACAUCGACACUC | 2692 |
| 1963314 | CfAfuacagccasasu | | ugaGfuGfucgausgsu | | AUACAGCCAAG | |
| AD- | ascsacu(Chd)AfuAf | 3714 | asAfsuadCu(Tgn)ggc | 4074 | CGACACUCAUAC | 2632 |
| 1963318 | CfAfgccaaguasusu | | uguAfuGfaguguscsg | | AGCCAAGUAUG | |
| AD- | csuscau(Ahd)CfaGf | 3715 | asGfsucdAu(Agn)cu | 4075 | CACUCAUACAGC | 2691 |
| 1963321 | CfCfaaguaugascsu | | uggcUfgUfaugagsusg | | CAAGUAUGACC | |
| AD- | uscsaua(Chd)AfgCf | 3716 | asGfsgudCa(Tgn)acu | 4076 | ACUCAUACAGCC | 2764 |
| 1963322 | CfAfaguaugacscsu | | uggCfuGfuaugasgsu | | AAGUAUGACCC | |
| AD- | csasuac(Ahd)GfcCf | 3717 | asGfsggdTc(Agn)uac | 4077 | CUCAUACAGCCA | 2788 |
| 1963323 | AfAfguaugaccscsu | | uugGfcUfguaugsasg | | AGUAUGACCCU | |
| AD- | usascag(Chd)CfaAf | 3718 | asAfsagdGg(Tgn)cau | 4078 | CAUACAGCCAAG | 2780 |
| 1963325 | GfUfaugacccususu | | acuUfgGfcuguasusg | | UAUGACCCUUC | |
| AD- | gscscaa(Ghd)UfaUf | 3719 | asAfsggdGa(Agn)gg | 4079 | CAGCCAAGUAUG | 2674 |
| 1963329 | GfAfcccuucccsusu | | gucaUfaCfuuggcsusg | | ACCCUUCCCUG | |
| AD- | gsasuaa(Ahd)UfuGf | 3720 | asCfsuuaAfcuagcucA | 4080 | AAGAUAAAUUGA | 2798 |
| 1963375 | AfGfcuaguuaasgsu | | faUfuuaucsusu | | GCUAGUUAAGG | |
| AD- | asusaaa(Uhd)UfgAf | 3721 | asCfscuuAfacuagcuC | 4081 | AGAUAAAUUGAG | 2819 |
| 1963376 | GfCfuaguuaagsgsu | | faAfuuuauscsu | | CUAGUUAAGGC | |
| AD- | usasaau(Uhd)GfaGf | 3722 | asGfsccuUfaacuagcU | 4082 | GAUAAAUUGAGC | 2784 |
| 1963377 | CfUfaguuaaggscsu | | fcAfauuuasusc | | UAGUUAAGGCA | |
| AD- | gsusaug(Ahd)CfcCf | 3723 | asGfscudTc(Agn)ggg | 4083 | AAGUAUGACCCU | 2830 |
| 1963384 | UfUfcccugaagscsu | | aagGfgUfcauacsusu | | UCCCUGAAGCC | |
| AD- | csusguc(Uhd)GfuUf | 3724 | asUfsgadTc(Agn)uag | 4084 | CCCUGUCUGUUU | 2560 |
| 1963386 | UfCfcuaugaucsasu | | gaaAfcAfgacagsgsg | | CCUAUGAUCAA | |
| AD- | gsuscug(Uhd)UfuCf | 3725 | asCfsuudGa(Tgn)cau | 4085 | CUGUCUGUUUCC | 2573 |
| 1963388 | CfUfaugaucaasgsu | | aggAfaAfcagacsasg | | UAUGAUCAAGC | |
| AD- | uscsugu(Uhd)UfcCf | 3726 | asGfscudTg(Agn)uca | 4086 | UGUCUGUUUCCU | 2577 |
| 1963389 | UfAfugaucaagscsu | | uagGfaAfacagascsa | | AUGAUCAAGCA | |
| AD- | usgsuuu(Chd)CfuAf | 3727 | asUfsugdCu(Tgn)gau | 4087 | UCUGUUUCCUAU | 2541 |
| 1963391 | UfGfaucaagcasasu | | cauAfgGfaaacasgsa | | GAUCAAGCAAC | |
| AD- | gsusuuc(Chd)UfaUf | 3728 | asGfsuudGc(Tgn)uga | 4088 | CUGUUUCCUAUG | 2548 |
| 1963392 | GfAfucaagcaascsu | | ucaUfaGfgaaacsasg | | AUCAAGCAACU | |
| AD- | uscscua(Uhd)GfaUf | 3729 | asGfsaadGu(Tgn)gcu | 4089 | UUUCCUAUGAUC | 2547 |
| 1963395 | CfAfagcaacuuscsu | | ugaUfcAfuaggasasa | | AAGCAACUUCC | |
| AD- | asgscua(Ghd)UfuAf | 3730 | asCfsugaUfuugccuu | 4090 | UGAGCUAGUUAA | 2735 |
| 1963410 | AfGfgcaaaucasgsu | | AfaCfuagcuscsa | | GGCAAAUCAGG | |
| AD- | gscsuag(Uhd)UfaAf | 3731 | asCfscugAfuuugccu | 4091 | GAGCUAGUUAAG | 2774 |
| 1963411 | GfGfcaaaucagsgsu | | UfaAfcuagcsusc | | GCAAAUCAGGU | |
| AD- | usasagg(Chd)AfaAf | 3732 | asAfsuuuUfaccugau | 4092 | GUUAAGGCAAAU | 2585 |
| 1963417 | UfCfagguaaaasusu | | UfuGfccuuasasc | | CAGGUAAAAUA | |
| AD- | asgsgca(Ahd)AfuCf | 3733 | asCfsuauUfuuaccug | 4093 | UAAGGCAAAUCA | 2698 |
| 1963419 | AfGfguaaaauasgsu | | AfuUfugccususa | | GGUAAAAUAGU | |
| AD- | gsgscaa(Ahd)UfcAf | 3734 | asAfscuaUfuuuaccu | 4094 | AAGGCAAAUCAG | 2702 |
| 1963420 | GfGfuaaaauagsusu | | GfaUfuugccsusu | | GUAAAAUAGUC | |
| AD- | gscsaaa(Uhd)CfaGf | 3735 | asGfsacuAfuuuuacc | 4095 | AGGCAAAUCAGG | 2695 |
| 1963421 | GfUfaaaauaguscsu | | UfgAfuuugcscsu | | UAAAAUAGUCA | |
| AD- | gsusaaa(Ahd)UfaGf | 3736 | asUfsagaAfucaugacU | 4096 | AGGUAAAAUAGU | 2775 |
| 1963430 | UfCfaugauucusasu | | faUfuuuacscsu | | CAUGAUUCUAU | |
| AD- | usasaaa(Uhd)AfgUf | 3737 | asAfsuagAfaucaugaC | 4097 | GGUAAAAUAGUC | 2765 |
| 1963431 | CfAfugauucuasusu | | fuAfuuuuascsc | | AUGAUUCUAUG | |
| AD- | asasaau(Ahd)GfuCf | 3738 | asCfsauaGfaaucaugA | 4098 | GUAAAAUAGUCA | 2750 |
| 1963432 | AfUfgauucuausgsu | | fcUfauuuusasc | | UGAUUCUAUGU | |
| AD- | asgsuca(Uhd)GfaUf | 3739 | asCfsauuAfcauagaaU | 4099 | AUAGUCAUGAUU | 4290 |
| 1963437 | UfCfuauguaausgsu | | fcAfugacusasu | | CUAUGUAAUGU | |
| AD- | gsuscau(Ghd)AfuUf | 3740 | asAfscauUfacauagaA | 4100 | UAGUCAUGAUUC | 2655 |
| 1963438 | CfUfauguaaugsusu | | fuCfaugacsusa | | UAUGUAAUGUA | |
| AD- | uscsaug(Ahd)UfuCf | 3741 | asUfsacaUfuacauagA | 4101 | AGUCAUGAUUCU | 2598 |
| 1963439 | UfAfuguaaugusasu | | faUfcaugascsu | | AUGUAAUGUAA | |
| AD- | cscscug(Ahd)GfgAf | 3742 | asAfsuudGu(Tgn)gag | 4102 | UUCCCUGAGGAU | 2752 |
| 1963464 | UfCfcucaacaasusu | | gauCfcUfcagggsasa | | CCUCAACAAUG | |
| AD- | cscsuga(Ghd)GfaUf | 3743 | asCfsaudTg(Tgn)uga | 4103 | UCCCUGAGGAUC | 2736 |
| 1963465 | CfCfucaacaausgsu | | ggaUfcCfucaggsgsa | | CUCAACAAUGG | |
| AD- | gsasgga(Uhd)CfcUf | 3744 | asGfsacdCa(Tgn)ugu | 4104 | CUGAGGAUCCUC | 2703 |
| 1963468 | CfAfacaaugguscsu | | ugaGfgAfuccucsasg | | AACAAUGGUCA | |
| AD- | asgsgau(Chd)CfuCf | 3745 | asUfsgadCc(Agn)uug | 4105 | UGAGGAUCCUCA | 2713 |
| 1963469 | AfAfcaauggucsasu | | uugAfgGfauccuscsa | | ACAAUGGUCAU | |
| AD- | usgscuu(Uhd)CfaAf | 3746 | asCfsaadAc(Tgn)cca | 4106 | CAUGCUUUCAAC | 2625 |
| 1963539 | CfGfuggaguuusgsu | | cguUfgAfaagcasusg | | GUGGAGUUUGA | |
| AD- | ususcaa(Chd)GfuGf | 3747 | asUfscadTc(Agn)aac | 4107 | CUUUCAACGUGG | 2665 |
| 1963543 | GfAfguuugaugsasu | | uccAfcGfuugaasasg | | AGUUUGAUGAC | |
| AD- | csasacg(Uhd)GfgAf | 3748 | asAfsgudCa(Tgn)caa | 4108 | UUCAACGUGGAG | 2715 |
| 1963545 | GfUfuugaugacsusu | | acuCfcAfcguugsasa | | UUUGAUGACUC | |
| AD- | asascgu(Ghd)GfaGf | 3749 | asGfsagdTc(Agn)uca | 4109 | UCAACGUGGAGU | 2694 |
| 1963546 | UfUfugaugacuscsu | | aacUfcCfacguusgsa | | UUGAUGACUCU | |
| AD- | csgsugg(Ahd)GfuUf | 3750 | asGfsagdAg(Tgn)cau | 4110 | AACGUGGAGUUU | 2664 |
| 1963548 | UfGfaugacucuscsu | | caaAfcUfccacgsusu | | GAUGACUCUCA | |
| AD- | usgsgag(Uhd)UfuGf | 3751 | asCfsugdAg(Agn)gu | 4111 | CGUGGAGUUUGA | 2613 |
| 1963550 | AfUfgacucucasgsu | | caucAfaAfcuccascsg | | UGACUCUCAGG | |
| AD- | gsasguu(Uhd)GfaUf | 3752 | asUfsccdTg(Agn)gag | 4112 | UGGAGUUUGAUG | 2718 |
| 1963552 | GfAfcucucaggsasu | | ucaUfcAfaacucscsa | | ACUCUCAGGAC | |
| AD- | gsusuug(Ahd)UfgAf | 3753 | asUfsgudCc(Tgn)gag | 4113 | GAGUUUGAUGAC | 2741 |
| 1963554 | CfUfcucaggacsasu | | aguCfaUfcaaacsusc | | UCUCAGGACAA | |
| AD- | usgsaug(Ahd)CfuCf | 3754 | asCfsuudTg(Tgn)ccu | 4114 | UUUGAUGACUCU | 2612 |
| 1963557 | UfCfaggacaaasgsu | | gagAfgUfcaucasasa | | CAGGACAAAGC | |
| AD- | usasauu(Ahd)GfaGf | 3755 | asCfsuguAfucacaacU | 4115 | UAUAAUUAGAGU | 2786 |
| 1963582 | UfUfgugauacasgsu | | fcUfaauuasusa | | UGUGAUACAGA | |
| AD- | gsusugu(Ghd)AfuAf | 3756 | asAfsauaUfacucugu | 4116 | GAGUUGUGAUAC | 2639 |
| 1963590 | CfAfgaguauaususu | | AfuCfacaacsusc | | AGAGUAUAUUU | |
| AD- | ususgug(Ahd)UfaCf | 3757 | asAfsaauAfuacucug | 4117 | AGUUGUGAUACA | 2636 |
| 1963591 | AfGfaguauauususu | | UfaUfcacaascsu | | GAGUAUAUUUC | |
| AD- | usgsuga(Uhd)AfcAf | 3758 | asGfsaaaUfauacucuG | 4118 | GUUGUGAUACAG | 2644 |
| 1963592 | GfAfguauauuuscsu | | fuAfucacasasc | | AGUAUAUUUCC | |
| AD- | asusgac(Uhd)CfuCf | 3759 | asUfsgcdTu(Tgn)guc | 4119 | UGAUGACUCUCA | 2734 |
| 1963609 | AfGfgacaaagcsasu | | cugAfgAfgucauscsa | | GGACAAAGCAG | |
| AD- | usgsacu(Chd)UfcAf | 3760 | asCfsugdCu(Tgn)ugu | 4120 | GAUGACUCUCAG | 2787 |
| 1963610 | GfGfacaaagcasgsu | | ccuGfaGfagucasusc | | GACAAAGCAGU | |
| AD- | cscsauu(Chd)AfgAf | 3761 | asAfsugaUfauauugu | 4121 | UUCCAUUCAGAC | 2552 |
| 1963618 | CfAfauauaucasusu | | CfuGfaauggsasa | | AAUAUAUCAUA | |
| AD- | ascsuuc(Ahd)CfuUf | 3762 | asUfsccdAg(Tgn)gaa | 4122 | GAACUUCACUUG | 2678 |
| 1963719 | GfGfuucacuggsasu | | ccaAfgUfgaagususc | | GUUCACUGGAA | |
| AD- | ususcac(Uhd)UfgGf | 3763 | asGfsuudCc(Agn)gu | 4123 | ACUUCACUUGGU | 2704 |
| 1963721 | UfUfcacuggaascsu | | gaacCfaAfgugaasgsu | | UCACUGGAACA | |
| AD- | gsasuuu(Uhd)GfgGf | 3764 | asUfsgcdAc(Agn)gcu | 4124 | GGGAUUUUGGGA | 2792 |
| 1963733 | AfAfagcugugcsasu | | uucCfcAfaaaucscsc | | AAGCUGUGCAG | |
| AD- | ususuug(Ghd)GfaAf | 3765 | asGfscudGc(Agn)cag | 4125 | GAUUUUGGGAAA | 2837 |
| 1963735 | AfGfcugugcagscsu | | cuuUfcCfcaaaasusc | | GCUGUGCAGCA | |
| AD- | usgsgga(Ahd)AfgCf | 3766 | asGfsuudGc(Tgn)gca | 4126 | UUUGGGAAAGCU | 2826 |
| 1963738 | UfGfugcagcaascsu | | cagCfuUfucccasasa | | GUGCAGCAACC | |
| AD- | usgsgac(Uhd)GfgCf | 3767 | asUfsacdCu(Agn)gaa | 4127 | GAUGGACUGGCC | 2836 |
| 1963762 | CfGfuucuaggusasu | | cggCfcAfguccasusc | | GUUCUAGGUAU | |
| AD- | gsgsacu(Ghd)GfcCf | 3768 | asAfsuadCc(Tgn)aga | 4128 | AUGGACUGGCCG | 2818 |
| 1963763 | GfUfucuagguasusu | | acgGfcCfaguccsasu | | UUCUAGGUAUU | |
| AD- | usasggu(Ahd)UfuUf | 3769 | asAfsacdCu(Tgn)caa | 4129 | UCUAGGUAUUUU | 2642 |
| 1963776 | UfUfuugaaggususu | | aaaAfaUfaccuasgsa | | UUUGAAGGUUG | |
| AD- | usasuuu(Uhd)UfuUf | 3770 | asUfsgcdCa(Agn)ccu | 4130 | GGUAUUUUUUUG | 2785 |
| 1963780 | GfAfagguuggcsasu | | ucaAfaAfaaauascsc | | AAGGUUGGCAG | |
| AD- | asusuuu(Uhd)UfuGf | 3771 | asCfsugdCc(Agn)acc | 4131 | GUAUUUUUUUGA | 2807 |
| 1963781 | AfAfgguuggcasgsu | | uucAfaAfaaaausasc | | AGGUUGGCAGC | |
| AD- | ususuug(Ahd)AfgGf | 3772 | asAfsgcdGc(Tgn)gcc | 4132 | UUUUUUGAAGGU | 2829 |
| 1963785 | UfUfggcagcgcsusu | | aacCfuUfcaaaasasa | | UGGCAGCGCUA | |
| AD- | asasggu(Uhd)GfgCf | 3773 | asGfsgudTu(Agn)gcg | 4133 | UGAAGGUUGGCA | 2842 |
| 1963790 | AfGfcgcuaaacscsu | | cugCfcAfaccuuscsa | | GCGCUAAACCG | |
| AD- | csusuca(Ghd)AfaAf | 3774 | asAfscadTc(Agn)aca | 4134 | GCCUUCAGAAAG | 2696 |
| 1963814 | GfUfuguugaugsusu | | acuUfuCfugaagsgsc | | UUGUUGAUGUG | |
| AD- | uscsaga(Ahd)AfgUf | 3775 | asGfscadCa(Tgn)caa | 4135 | CUUCAGAAAGUU | 2795 |
| 1963816 | UfGfuugaugugscsu | | caaCfuUfucugasasg | | GUUGAUGUGCU | |
| AD- | csasgaa(Ahd)GfuUf | 3776 | asAfsgcdAc(Agn)uca | 4136 | UUCAGAAAGUUG | 2754 |
| 1963817 | GfUfugaugugcsusu | | acaAfcUfuucugsasa | | UUGAUGUGCUG | |
| AD- | gsasaag(Uhd)UfgUf | 3777 | asCfscadGc(Agn)cau | 4137 | CAGAAAGUUGUU | 2820 |
| 1963819 | UfGfaugugcugsgsu | | caaCfaAfcuuucsusg | | GAUGUGCUGGA | |
| AD- | asusucc(Ahd)UfuAf | 3778 | asGfsccdCu(Tgn)ugu | 4138 | GGAUUCCAUUAA | 2729 |
| 1963839 | AfAfacaaagggscsu | | uuuAfaUfggaauscsc | | AACAAAGGGCA | |
| AD- | ususcca(Uhd)UfaAf | 3779 | asUfsgcdCc(Tgn)uug | 4139 | GAUUCCAUUAAA | 2648 |
| 1963840 | AfAfcaaagggcsasu | | uuuUfaAfuggaasusc | | ACAAAGGGCAA | |
| AD- | ususaaa(Ahd)CfaAf | 3780 | asAfscudCu(Tgn)gcc | 4140 | CAUUAAAACAAA | 2812 |
| 1963845 | AfGfggcaagagsusu | | cuuUfgUfuuuaasusg | | GGGCAAGAGUG | |
| AD- | usasaaa(Chd)AfaAf | 3781 | asCfsacdTc(Tgn)ugc | 4141 | AUUAAAACAAAG | 2793 |
| 1963846 | GfGfgcaagagusgsu | | ccuUfuGfuuuuasasu | | GGCAAGAGUGC | |
| AD- | asasaca(Ahd)AfgGf | 3782 | asAfsgcdAc(Tgn)cuu | 4142 | UAAAACAAAGGG | 2804 |
| 1963848 | GfCfaagagugcsusu | | gccCfuUfuguuususa | | CAAGAGUGCUG | |
| AD- | ascsaaa(Ghd)GfgCf | 3783 | asUfscadGc(Agn)cuc | 4143 | AAACAAAGGGCA | 2824 |
| 1963850 | AfAfgagugcugsasu | | uugCfcCfuuugususu | | AGAGUGCUGAC | |
| AD- | asasggg(Chd)AfaGf | 3784 | asAfsagdTc(Agn)gca | 4144 | CAAAGGGCAAGA | 2724 |
| 1963853 | AfGfugcugacususu | | cucUfuGfcccuususg | | GUGCUGACUUC | |
| AD- | gsgsgca(Ahd)GfaGf | 3785 | asUfsgadAg(Tgn)cag | 4145 | AAGGGCAAGAGU | 2699 |
| 1963855 | UfGfcugacuucsasu | | cac UfcUfugcccsusu | | GCUGACUUCAC | |
| AD- | gscsaag(Ahd)GfuGf | 3786 | asAfsgudGa(Agn)gu | 4146 | GGGCAAGAGUGC | 2727 |
| 1963857 | CfUfgacuucacsusu | | cagcAfcUfcuugcscsc | | UGACUUCACUA | |
| AD- | csasaga(Ghd)UfgCf | 3787 | asUfsagdTg(Agn)agu | 4147 | GGCAAGAGUGCU | 2649 |
| 1963858 | UfGfacuucacusasu | | cagCfaCfucuugscsc | | GACUUCACUAA | |
| AD- | asgsagu(Ghd)CfuGf | 3788 | asGfsuudAg(Tgn)gaa | 4148 | CAAGAGUGCUGA | 4291 |
| 1963860 | AfCfuucacuaascsu | | gucAfgCfacucususg | | CUUCACUAACU | |
| AD- | gsusgcu(Ghd)AfcUf | 3789 | asGfsaadGu(Tgn)agu | 4149 | GAGUGCUGACUU | 2557 |
| 1963863 | UfCfacuaacuuscsu | | gaaGfuCfagcacsusc | | CACUAACUUCG | |
| AD- | usgscug(Ahd)CfuUf | 3790 | asCfsgadAg(Tgn)uag | 4150 | AGUGCUGACUUC | 2583 |
| 1963864 | CfAfcuaacuucsgsu | | ugaAfgUfcagcascsu | | ACUAACUUCGA | |
| AD- | csusuca(Chd)UfaAf | 3791 | asGfsagdGa(Tgn)cga | 4151 | GACUUCACUAAC | 2589 |
| 1963870 | CfUfucgauccuscsu | | aguUfaGfugaagsusc | | UUCGAUCCUCG | |
| AD- | ususcac(Uhd)AfaCf | 3792 | asCfsgadGg(Agn)ucg | 4152 | ACUUCACUAACU | 2593 |
| 1963871 | UfUfcgauccucsgsu | | aagUfuAfgugaasgsu | | UCGAUCCUCGU | |
| AD- | gscscuc(Chd)UfuCf | 3793 | asCfsaadGg(Agn)uuc | 4153 | UGGCCUCCUUCC | 2688 |
| 1963893 | CfUfgaauccuusgsu | | aggAfaGfgaggcscsa | | UGAAUCCUUGG | |
| AD- | uscscuu(Chd)CfuGf | 3794 | asAfsucdCa(Agn)gga | 4154 | CCUCCUUCCUGA | 2608 |
| 1963896 | AfAfuccuuggasusu | | uucAfgGfaaggasgsg | | AUCCUUGGAUU | |
| AD- | gsgsacc(Uhd)AfcCf | 3795 | asCfsagdTg(Agn)gcc | 4155 | CUGGACCUACCC | 2840 |
| 1963920 | CfAfggcucacusgsu | | uggGfuAfgguccsasg | | AGGCUCACUGA | |
| AD- | ascscua(Chd)CfcAf | 3796 | asGfsucdAg(Tgn)gag | 4156 | GGACCUACCCAG | 2839 |
| 1963922 | GfGfcucacugascsu | | ccuGfgGfuagguscsc | | GCUCACUGACC | |
| AD- | csusacc(Chd)AfgGf | 3797 | asUfsggdTc(Agn)gug | 4157 | ACCUACCCAGGC | 2831 |
| 1963924 | CfUfcacugaccsasu | | agcCfuGfgguagsgsu | | UCACUGACCAC | |
| AD- | ascscca(Ghd)GfcUf | 3798 | asGfsgudGg(Tgn)cag | 4158 | CUACCCAGGCUC | 2832 |
| 1963926 | CfAfcugaccacscsu | | ugaGfcCfugggusasg | | ACUGACCACCC | |
| AD- | csusccu(Chd)UfuCf | 3799 | asCfsacdAc(Agn)uuc | 4159 | CCCUCCUCUUCU | 2623 |
| 1963927 | UfGfgaaugugusgsu | | cagAfaGfaggagsgsg | | GGAAUGUGUGA | |
| AD- | cscsucu(Uhd)CfuGf | 3800 | asGfsucdAc(Agn)cau | 4160 | CUCCUCUUCUGG | 2575 |
| 1963929 | GfAfaugugugascsu | | uccAfgAfagaggsasg | | AAUGUGUGACC | |
| AD- | uscsuuc(Uhd)GfgAf | 3801 | asAfsggdTc(Agn)cac | 4161 | CCUCUUCUGGAA | 2645 |
| 1963931 | AfUfgugugaccsusu | | auuCfcAfgaagasgsg | | UGUGUGACCUG | |
| AD- | ususcug(Ghd)AfaUf | 3802 | asCfscadGg(Tgn)cac | 4162 | UCUUCUGGAAUG | 2783 |
| 1963933 | GfUfgugaccugsgsu | | acaUfuCfcagaasgsa | | UGUGACCUGGA | |
| AD- | usgsgaa(Uhd)GfuGf | 3803 | asAfsaudCc(Agn)ggu | 4163 | UCUGGAAUGUGU | 2778 |
| 1963936 | UfGfaccuggaususu | | cacAfcAfuuccasgsa | | GACCUGGAUUG | |
| AD- | usgsugu(Ghd)AfcCf | 3804 | asAfsgcdAc(Agn)auc | 4164 | AAUGUGUGACCU | 2805 |
| 1963941 | UfGfgauugugcsusu | | cagGfuCfacacasusu | | GGAUUGUGCUC | |
| AD- | usgsuga(Chd)CfuGf | 3805 | asUfsgadGc(Agn)caa | 4165 | UGUGUGACCUGG | 2761 |
| 1963943 | GfAfuugugcucsasu | | uccAfgGfucacascsa | | AUUGUGCUCAA | |
| AD- | gsasccu(Ghd)GfaUf | 3806 | asCfscudTg(Agn)gca | 4166 | GUGACCUGGAUU | 2656 |
| 1963946 | UfGfugcucaagsgsu | | caaUfcCfaggucsasc | | GUGCUCAAGGA | |
| AD- | cscsugg(Ahd)UfuGf | 3807 | asUfsucdCu(Tgn)gag | 4167 | GACCUGGAUUGU | 2619 |
| 1963948 | UfGfcucaaggasasu | | cacAfaUfccaggsusc | | GCUCAAGGAAC | |
| AD- | csusgga(Uhd)UfgUf | 3808 | asGfsuudCc(Tgn)uga | 4168 | ACCUGGAUUGUG | 2581 |
| 1963949 | GfCfucaaggaascsu | | gcaCfaAfuccagsgsu | | CUCAAGGAACC | |
| AD- | gsasuug(Uhd)GfcUf | 3809 | asUfsggdGu(Tgn)ccu | 4169 | UGGAUUGUGCUC | 2763 |
| 1963952 | CfAfaggaacccsasu | | ugaGfcAfcaaucscsa | | AAGGAACCCAU | |
| AD- | asusugu(Ghd)CfuCf | 3810 | asAfsugdGg(Tgn)ucc | 4170 | GGAUUGUGCUCA | 2745 |
| 1963953 | AfAfcgaacccasusu | | uugAfgCfacaauscsc | | AGGAACCCAUC | |
| AD- | usgscuc(Ahd)AfgGf | 3811 | asGfscudGa(Tgn)ggg | 4171 | UGUGCUCAAGGA | 2808 |
| 1963957 | AfAfcccaucagscsu | | uucCfuUfgagcascsa | | ACCCAUCAGOG | |
| AD- | gscsuca(Ahd)GfgAf | 3812 | asCfsgcdTg(Agn)ugg | 4172 | GUGCUCAAGGAA | 2782 |
| 1963958 | AfCfccaucagcsgsu | | guuCfcUfugagcsasc | | CCCAUCAGCGU | |
| AD- | uscsaag(Ghd)AfaCf | 3813 | asGfsacdGc(Tgn)gau | 4173 | GCUCAAGGAACC | 2794 |
| 1963960 | CfCfaucagcguscsu | | gggUfuCfcuugasgsc | | CAUCAGCGUCA | |
| AD- | gsgsaac(Chd)CfaUf | 3814 | asUfsgcdTg(Agn)cgc | 4174 | AAGGAACCCAUC | 2802 |
| 1963964 | CfAfgcgucagcsasu | | ugaUfgGfguuccsusu | | AGCGUCAGCAG | |
| AD- | asasccc(Ahd)UfcAf | 3815 | asGfscudGc(Tgn)gac | 4175 | GGAACCCAUCAG | 2827 |
| 1963966 | GfCfgucagcagscsu | | gcuGfaUfggguuscsc | | CGUCAGCAGCG | |
| AD- | ususgaa(Ahd)UfuCf | 3816 | asUfsuadAg(Tgn)uua | 4176 | UGUUGAAAUUCC | 2631 |
| 1963995 | CfGfuaaacuuasasu | | cggAfaUfuucaascsa | | GUAAACUUAAC | |
| AD- | gsasaau(Uhd)CfcGf | 3817 | asAfsgudTa(Agn)guu | 4177 | UUGAAAUUCCGU | 2584 |
| 1963997 | UfAfaacuuaacsusu | | uacGfgAfauuucsasa | | AAACUUAACUU | |
| AD- | asasuuc(Chd)GfuAf | 3818 | asGfsaadGu(Tgn)aag | 4178 | GAAAUUCCGUAA | 2590 |
| 1963999 | AfAfcuuaacuuscsu | | uuuAfcGfgaauususc | | ACUUAACUUCA | |
| AD- | asusucc(Ghd)UfaAf | 3819 | asUfsgadAg(Tgn)uaa | 4179 | AAAUUCCGUAAA | 2546 |
| 1964000 | AfCfuuaacuucsasu | | guuUfaCfggaaususu | | CUUAACUUCAA | |
| AD- | uscscgu(Ahd)AfaCf | 3820 | asAfsuudGa(Agn)gu | 4180 | AUUCCGUAAACU | 2574 |
| 1964002 | UfUfaacuucaasusu | | uaagUfuUfacggasasu | | UAACUUCAAUG | |
| AD- | cscsgua(Ahd)AfcUf | 3821 | asCfsaudTg(Agn)agu | 4181 | UUCCGUAAACUU | 2556 |
| 1964003 | UfAfacuucaausgsu | | uaaGfuUfuacggsasa | | AACUUCAAUGG | |
| AD- | csgsaag(Ahd)AfcUf | 3822 | asUfsgudCc(Agn)cca | 4182 | CCCGAAGAACUG | 2767 |
| 1964016 | GfAfugguggacsasu | | ucaGfuUfcuucgsgsg | | AUGGUGGACAA | |
| AD- | asgsaac(Uhd)GfaUf | 3823 | asAfsgudTg(Tgn)cca | 4183 | GAAGAACUGAUG | 2705 |
| 1964019 | GfGfuggacaacsusu | | ccaUfcAfguucususc | | GUGGACAACUG | |
| AD- | asascug(Ahd)UfgGf | 3824 | asCfscadGu(Tgn)guc | 4184 | AGAACUGAUGGU | 2844 |
| 1964021 | UfGfgacaacugsgsu | | cacCfaUfcaguuscsu | | GGACAACUGGC | |
| AD- | ascsuga(Uhd)GfgUf | 3825 | asGfsccdAg(Tgn)ugu | 4185 | GAACUGAUGGUG | 2848 |
| 1964022 | GfGfacaacuggscsu | | ccaCfcAfucagususc | | GACAACUGGCG | |
| AD- | usgsaug(Ghd)UfgGf | 3826 | asGfscgdCc(Agn)guu | 4186 | ACUGAUGGUGGA | 2823 |
| 1964024 | AfCfaacuggcgscsu | | gucCfaCfcaucasgsu | | CAACUGGOGCC | |
| AD- | csasgcu(Chd)AfgCf | 3827 | asGfsuudCu(Tgn)cag | 4187 | CCCAGCUCAGCC | 2814 |
| 1964043 | CfAfcugaagaascsu | | uggCfuGfagcugsgsg | | ACUGAAGAACA | |
| AD- | asgscuc(Ahd)GfcCf | 3828 | asUfsgudTc(Tgn)uca | 4188 | CCAGCUCAGCCA | 2828 |
| 1964044 | AfCfugaagaacsasu | | gugGfcUfgagcusgsg | | CUGAAGAACAG | |
| AD- | csuscag(Chd)CfaCf | 3829 | asCfscudGu(Tgn)cuu | 4189 | AGCUCAGCCACU | 2799 |
| 1964046 | UfGfaagaacagsgsu | | cagUfgGfcugagscsu | | GAAGAACAGGC | |
| AD- | uscsagc(Chd)AfcUf | 3830 | asGfsccdTg(Tgn)ucu | 4190 | GCUCAGCCACUG | 2777 |
| 1964047 | GfAfagaacaggscsu | | ucaGfuGfgcugasgsc | | AAGAACAGGCA | |
| AD- | asgscca(Chd)UfgAf | 3831 | asUfsugdCc(Tgn)guu | 4191 | UCAGCCACUGAA | 2728 |
| 1964049 | AfGfaacaggcasasu | | cuuCfaGfuggcusgsa | | GAACAGGCAAA | |
| AD- | ascsuga(Ahd)GfaAf | 3832 | asUfsgadTu(Tgn)gcc | 4192 | CCACUGAAGAAC | 2621 |
| 1964053 | CfAfggcaaaucsasu | | uguUfcUfucagusgsg | | AGGCAAAUCAA | |
| AD- | csusgaa(Ghd)AfaCf | 3833 | asUfsugdAu(Tgn)ugc | 4193 | CACUGAAGAACA | 2602 |
| 1964054 | AfGfgcaaaucasasu | | cugUfuCfuucagsusg | | GGCAAAUCAAA | |
| AD- | usgsaag(Ahd)AfcAf | 3834 | asUfsuudGa(Tgn)uug | 4194 | ACUGAAGAACAG | 2622 |
| 1964055 | GfGfcaaaucaasasu | | ccuGfuUfcuucasgsu | | GCAAAUCAAAG | |
| AD- | gsasaga(Ahd)CfaGf | 3835 | asCfsuudTg(Agn)uuu | 4195 | CUGAAGAACAGG | 2658 |
| 1964056 | GfCfaaaucaaasgsu | | gccUfgUfucuucsasg | | CAAAUCAAAGC | |
| AD- | asgsaac(Ahd)GfgCf | 3836 | asAfsgcdTu(Tgn)gau | 4196 | GAAGAACAGGCA | 2749 |
| 1964058 | AfAfaucaaagcsusu | | uugCfcUfguucususc | | AAUCAAAGCUU | |
| AD- | gsasaca(Ghd)GfcAf | 3837 | asAfsagdCu(Tgn)uga | 4197 | AAGAACAGGCAA | 2683 |
| 1964059 | AfAfucaaagcususu | | unuGfcCfuguucsusu | | AUCAAAGCUUC | |
| AD- | asascag(Ghd)CfaAf | 3838 | asGfsaadGc(Tgn)uug | 4198 | AGAACAGGCAAA | 2610 |
| 1964060 | AfUfcaaagcuuscsu | | auuUfgCfcuguuscsu | | UCAAAGCUUCC | |
| AD- | asgsgca(Ahd)AfuCf | 3839 | asAfsagdGa(Agn)gcu | 4199 | ACAGGCAAAUCA | 2567 |
| 1964063 | AfAfagcuuccususu | | uugAfuUfugccusgsu | | AAGCUUCCUUC | |
| AD- | gsgscaa(Ahd)UfcAf | 3840 | asGfsaadGg(Agn)agc | 4200 | CAGGCAAAUCAA | 2568 |
| 1964064 | AfAfccuuccuuscsu | | uuuGfaUfuugccsusg | | AGCUUCCUUCA | |
| AD- | asasauc(Ahd)AfaGf | 3841 | asUfsuudGa(Agn)gg | 4201 | GCAAAUCAAAGC | 2564 |
| 1964067 | CfUfuccuucaasasu | | aagcUfuUfgauuusgsc | | UUCCUUCAAAU | |
| AD- | asasuca(Ahd)AfgCf | 3842 | asAfsuudTg(Agn)agg | 4202 | CAAAUCAAAGCU | 2554 |
| 1964068 | UfUfccuucaaasusu | | aagCfufugauususg | | UCCUUCAAAUA | |
| AD- | uscsaaa(Ghd)CfuUf | 3843 | asUfsuadTu(Tgn)gaa | 4203 | AAUCAAAGCUUC | 2544 |
| 1964070 | CfCfuucaaauasasu | | ggaAfgCfuuugasusu | | CUUCAAAUAAG | |
| AD- | asasagc(Uhd)UfcCf | 3844 | asUfscudTa(Tgn)uug | 4204 | UCAAAGCUUCCU | 2569 |
| 1964072 | UfUfcaaauaagsasu | | aagGfaAfgcuuusgsa | | UCAAAUAAGAU | |
| AD- | asasgcu(Uhd)CfcUf | 3845 | asAfsucdTu(Agn)uuu | 4205 | CAAAGCUUCCUU | 2558 |
| 1964073 | UfCfaaauaagasusu | | gaaGfgAfagcuususg | | CAAAUAAGAUG | |
| AD- | gscsuuc(Chd)UfuCf | 3846 | asCfscadTc(Tgn)uau | 4206 | AAGCUUCCUUCA | 2563 |
| 1964075 | AfAfauaagaugsgsu | | ungAfaGfgaagcsusu | | AAUAAGAUGGU | |
| AD- | ususccu(Uhd)CfaAf | 3847 | asGfsacdCa(Tgn)cuu | 4207 | GCUUCCUUCAAA | 2630 |
| 1964077 | AfUfaagaugguscsu | | auuUfgAfaggaasgsc | | UAAGAUGGUCC | |
| AD- | uscscuu(Chd)AfaAf | 3848 | asGfsgadCc(Agn)ucu | 4208 | CUUCCUUCAAAU | 2687 |
| 1964078 | UfAfagauggucscsu | | uauUfuGfaaggasasg | | AAGAUGGUCCC | |
| AD- | ususcaa(Ahd)UfaAf | 3849 | asAfsugdGg(Agn)cca | 4209 | CCUUCAAAUAAG | 2771 |
| 1964081 | GfAfuggucccasusu | | ucuUfaUfuugaasgsg | | AUGGUCCCAUA | |
| AD- | gsuscug(Uhd)AfuCf | 3850 | asUfsucdAu(Tgn)auu | 4210 | UAGUCUGUAUCC | 2545 |
| 1964102 | CfAfaauaaugasasu | | uggAfuAfcagacsusa | | AAAUAAUGAAU | |
| AD- | uscsugu(Ahd)UfcCf | 3851 | asAfsuudCa(Tgn)uau | 4211 | AGUCUGUAUCCA | 2553 |
| 1964103 | AfAfauaaugaasusu | | uugGfaUfacagascsu | | AAUAAUGAAUC | |
| AD- | csusgua(Uhd)CfcAf | 3852 | asGfsaudTc(Agn)uua | 4212 | GUCUGUAUCCAA | 2627 |
| 1964104 | AfAfuaaugaauscsu | | uuuGfgAfuacagsasc | | AUAAUGAAUCU | |
| AD- | gsusauc(Chd)AfaAf | 3853 | asAfsagdAu(Tgn)cau | 4213 | CUGUAUCCAAAU | 2561 |
| 1964106 | UfAfaugaaucususu | | uauUfuGfgauacsasg | | AAUGAAUCUUC | |
| AD- | usasucc(Ahd)AfaUf | 3854 | asGfsaadGa(Tgn)uca | 4214 | UGUAUCCAAAUA | 2576 |
| 1964107 | AfAfugaaucuuscsu | | uuaUfuUfggauascsa | | AUGAAUCUUCG | |
| AD- | asuscca(Ahd)AfuAf | 3855 | asCfsgadAg(Agn)uuc | 4215 | GUAUCCAAAUAA | 2614 |
| 1964108 | AfUfgaaucuucsgsu | | auuAfuUfuggausasc | | UGAAUCUUCGG | |
| AD- | asasuga(Ahd)UfcUf | 3856 | asGfsaadAc(Agn)ccc | 4216 | AUAAUGAAUCUU | 2742 |
| 1964116 | UfCfggguguuuscsu | | gaaGfaUfucauusasu | | CGGGUGUUUCC | |
| AD- | usgsaau(Chd)UfuCf | 3857 | asGfsggdAa(Agn)cac | 4217 | AAUGAAUCUUCG | 2739 |
| 1964118 | GfGfguguuuccscsu | | ccgAfaGfauucasusu | | GGUGUUUCCCU | |
| AD- | ususagc(Uhd)AfaGf | 3858 | asGfsuadGa(Tgn)cug | 4218 | CUUUAGCUAAGC | 2588 |
| 1964139 | CfAfcagaucuascsu | | ugcUfuAfgcuaasasg | | ACAGAUCUACC | |
| AD- | usasgcu(Ahd)AfgCf | 3859 | asGfsgudAg(Agn)uc | 4219 | UUUAGCUAAGCA | 2635 |
| 1964140 | AfCfagaucuacscsu | | ugugCfuUfagcuasasa | | CAGAUCUACCU | |
| AD- | gscsuaa(Ghd)CfaCf | 3860 | asAfsagdGu(Agn)ga | 4220 | UAGCUAAGCACA | 2594 |
| 1964142 | AfGfaucuaccususu | | ucugUfgCfuuagcsusa | | GAUCUACCUUG | |
| AD- | csusaag(Chd)AfcAf | 3861 | asCfsaadGg(Tgn)aga | 4221 | AGCUAAGCACAG | 2600 |
| 1964143 | GfAfucuaccuusgsu | | ucuGfuGfcuuagscsu | | AUCUACCUUGG | |
| AD- | csasgau(Chd)UfaCf | 3862 | asAfsaadTc(Agn)cca | 4222 | CACAGAUCUACC | 2580 |
| 1964150 | CfUfuggugauususu | | aggUfaGfaucugsusg | | UUGGUGAUUUG | |
| AD- | asasuaa(Ahd)AfuGf | 3863 | asUfscudAg(Tgn)cuu | 4223 | CUAAUAAAAUGU | 2768 |
| 1964229 | UfGfaagacuagsasu | | cacAfuUfuuauusasg | | GAAGACUAGAC | |
| AD- | ascsaac(Uhd)GfcUf | 3864 | asCfsaadCc(Agn)gcc | 4224 | ACACAACUGCUG | 2845 |
| 1964267 | GfUfggcugguusgsu | | acaGfcAfguugusgsu | | UGGCUGGUUGG | |
| AD- | csusgug(Ghd)CfuGf | 3865 | asAfsaadGc(Agn)cca | 4225 | UGCUGUGGCUGG | 2813 |
| 1964274 | GfUfuggugcuususu | | accAfgCfcacagscsa | | UUGGUGCUUUG | |
| AD- | ususggu(Ghd)CfuUf | 3866 | asUfsacdCa(Tgn)aaa | 4226 | GGUUGGUGCUUU | 2651 |
| 1964284 | UfGfuuuauggusasu | | caaAfgCfaccaascsc | | GUUUAUGGUAG | |
| AD- | gscsuuu(Ghd)UfuUf | 3867 | asAfscudAc(Tgn)acc | 4227 | GUGCUUUGUUUA | 2604 |
| 1964289 | AfUfgguaguagsusu | | auaAfaCfaaagcsasc | | UGGUAGUAGUU | |
| AD- | ususugu(Uhd)UfaUf | 3868 | asAfsaadCu(Agn)cua | 4228 | GCUUUGUUUAUG | 2723 |
| 1964291 | GfGfuaguaguususu | | ccaUfaAfacaaasgsc | | GUAGUAGUUUU | |
| AD- | ususguu(Uhd)AfuGf | 3869 | asAfsaadAc(Tgn)acu | 4229 | CUUUGUUUAUGG | 2773 |
| 1964292 | GfUfaguaguuasusu | | accAfuAfaacaasasg | | UAGUAGUUUUU | |
| AD- | asusggu(Ahd)GfuAf | 3870 | asUfsacdAg(Agn)aaa | 4230 | UUAUGGUAGUAG | 2617 |
| 1964297 | GfUfuuuucugusasu | | acuAfcUfaccausasa | | UUUUUCUGUAA | |
| AD- | gsgsuag(Uhd)AfgUf | 3871 | asGfsuudAc(Agn)gaa | 4231 | AUGGUAGUAGUU | 2748 |
| 1964299 | UfUfuucuguaascsu | | aaaCfuAfcuaccsasu | | UUUCUGUAACA | |
| AD- | usasgua(Ghd)UfuUf | 3872 | asGfsugdTu(Agn)cag | 4232 | GGUAGUAGUUUU | 2740 |
| 1964301 | UfUfcuguaacascsu | | aaaAfaCfuacuascsc | | UCUGUAACACA | |
| AD- | asgsuag(Uhd)UfuUf | 3873 | asUfsgudGu(Tgn)aca | 4233 | GUAGUAGUUUUU | 2709 |
| 1964302 | UfCfuguaacacsasu | | gaaAfaAfcuacusasc | | CUGUAACACAG | |
| AD- | gsusagu(Uhd)UfuUf | 3874 | asCfsugdTg(Tgn)uac | 4234 | UAGUAGUUUUUC | 2730 |
| 1964303 | CfUfguaacacasgsu | | agaAfaAfacuacsusa | | UGUAACACAGA | |
| AD- | asasuaa(Ghd)AfaUf | 3875 | asCfsaadGg(Tgn)acu | 4235 | GAAAUAAGAAUA | 2708 |
| 1964325 | AfAfaguaccuusgsu | | uuaUfuCfuuauususc | | AAGUACCUUGA | |
| AD- | asasgaa(Uhd)AfaAf | 3876 | asAfsgudCa(Agn)gg | 4236 | AUAAGAAUAAAG | 2571 |
| 1964328 | GfUfaccuugacsusu | | uacuUfuAfuucuusasu | | UACCUUGACUU | |
| AD- | asgsaau(Ahd)AfaGf | 3877 | asAfsagdTc(Agn)agg | 4237 | UAAGAAUAAAGU | 2572 |
| 1964329 | UfAfccuugacususu | | uacUfuUfauucususa | | ACCUUGACUUU | |
| AD- | asasuaa(Ahd)GfuAf | 3878 | asCfsaadAg(Tgn)caa | 4238 | AGAAUAAAGUAC | 2706 |
| 1964331 | CfCfuugacuuusgsu | | cguAfcUfuuauuscsu | | CUUGACUUUGU | |
| AD- | asasgua(Chd)CfuUf | 3879 | asUfsgadAc(Agn)aag | 4239 | UAAAGUACCUUG | 2579 |
| 1964335 | GfAfcuuuguucsasu | | ucaAfgGfuacuususa | | ACUUUGUUCAC | |
| AD- | gsusacc(Uhd)UfgAf | 3880 | asUfsgudGa(Agn)caa | 4240 | AAGUACCUUGAC | 2661 |
| 1964337 | CfUfuuguucacsasu | | aguCfaAfgguacsusu | | UUUGUUCACAG | |
| AD- | usasccu(Uhd)GfaCf | 3881 | asCfsugdTg(Agn)aca | 4241 | AGUACCUUGACU | 2667 |
| 1964338 | UfUfuguucacasgsu | | aagUfcAfagguascsu | | UUGUUCACAGC | |
| AD- | cscsung(Ahd)CfuUf | 3882 | asUfsgcdTg(Tgn)gaa | 4242 | UACCUUGACUUU | 2618 |
| 1964340 | UfGfuucacagcsasu | | caaAfgUfcaaggsusa | | GUUCACAGCAU | |
| AD- | ususgac(Uhd)UfuGf | 3883 | asCfsaudGc(Tgn)gug | 4243 | CCUUGACUUUGU | 2615 |
| 1964342 | UfUfcacagcausgsu | | aacAfaAfgucaasgsg | | UCACAGCAUGU | |
| AD- | csusuug(Uhd)UfcAf | 3884 | asCfscudAc(Agn)ugc | 4244 | GACUUUGUUCAC | 2707 |
| 1964346 | CfAfgcauguagsgsu | | uguGfaAfcaaagsusc | | AGCAUGUAGGG | |
| AD- | csascag(Chd)AfuGf | 3885 | asUfscadTc(Agn)ccc | 4245 | UUCACAGCAUGU | 2790 |
| 1964353 | UfAfgggugaugsasu | | uacAfuGfcugugsasa | | AGGGUGAUGAG | |
| AD- | csasgca(Uhd)GfuAf | 3886 | asGfscudCa(Tgn)cac | 4246 | CACAGCAUGUAG | 2800 |
| 1964355 | GfGfgugaugagscsu | | ccuAfcAfugcugsusg | | GGUGAUGAGCA | |
| AD- | asgscau(Ghd)UfaGf | 3887 | asUfsgcdTc(Agn)uca | 4247 | ACAGCAUGUAGG | 2797 |
| 1964356 | GfGfugaugagcsasu | | cccUfaCfaugcusgsu | | GUGAUGAGCAC | |
| AD- | csasugu(Ahd)GfgGf | 3888 | asAfsgudGc(Tgn)cau | 4248 | AGCAUGUAGGGU | 2817 |
| 1964358 | UfGfaugagcacsusu | | cacCfcUfacaugscsu | | GAUGAGCACUC | |
| AD- | gsascua(Ahd)AfaUf | 3889 | asUfsuadAa(Agn)gca | 4249 | UUGACUAAAAUG | 2609 |
| 1964388 | GfCfugcuuuuasasu | | gcaUfuUfuagucsasa | | CUGCUUUUAAA | |
| AD- | asasaau(Ghd)CfuGf | 3890 | asUfsgudTu(Tgn)aaa | 4250 | CUAAAAUGCUGC | 2596 |
| 1964392 | CfUfuuuaaaacsasu | | agcAfgCfauuuusasg | | UUUUAAAACAU | |
| AD- | asusgcu(Ghd)CfuUf | 3891 | asCfsuadTg(Tgn)uuu | 4251 | AAAUGCUGCUUU | 2549 |
| 1964395 | UfUfaaaacauasgsu | | aaaAfgCfagcaususu | | UAAAACAUAGG | |
| AD- | gscsugc(Uhd)UfuUf | 3892 | asUfsccdTa(Tgn)guu | 4252 | AUGCUGCUUUUA | 2597 |
| 1964397 | AfAfaacauaggsasu | | unaAfaAfgcagcsasu | | AAACAUAGGAA | |
| AD- | csusgcu(Uhd)UfuAf | 3893 | asUfsucdCu(Agn)ug | 4253 | UGCUGCUUUUAA | 2591 |
| 1964398 | AfAfacauaggasasu | | uuuuAfaAfagcagscsa | | AACAUAGGAAA | |
| AD- | usgscuu(Uhd)UfaAf | 3894 | asUfsuudCc(Tgn)aug | 4254 | GCUGCUUUUAAA | 2582 |
| 1964399 | AfAfcauaggaasasu | | uuuUfaAfaagcasgsc | | ACAUAGGAAAG | |
| AD- | ususuua(Ahd)AfaCf | 3895 | asUfsacdTu(Tgn)ccu | 4255 | GCUUUUAAAACA | 2719 |
| 1964402 | AfUfaggaaagusasu | | augUfuUfuaaaasgsc | | UAGGAAAGUAG | |
| AD- | asasaca(Uhd)AfgGf | 3896 | asCfsaudTc(Tgn)acu | 4256 | UAAAACAUAGGA | 2733 |
| 1964407 | AfAfaguagaausgsu | | uucCfuAfuguuususa | | AAGUAGAAUGG | |
| AD- | ususgag(Uhd)GfcAf | 3897 | asUfsgcdTa(Tgn)gga | 4257 | GGUUGAGUGCAA | 2711 |
| 1964428 | AfAfuccauagcsasu | | uuuGfcAfcucaascsc | | AUCCAUAGCAC | |
| AD- | usgsagu(Ghd)CfaAf | 3898 | asGfsugdCu(Agn)ug | 4258 | GUUGAGUGCAAA | 2669 |
| 1964429 | AfUfccauagcascsu | | gauuUfgCfacucasasc | | UCCAUAGCACA | |
| AD- | asasgau(Ahd)AfaUf | 3899 | asUfsaadCu(Agn)gcu | 4259 | ACAAGAUAAAUU | 2587 |
| 1964449 | UfGfagcuaguusasu | | caaUfuUfaucuusgsu | | GAGCUAGUUAA | |
| AD- | asgsaua(Ahd)AfuUf | 3900 | asUfsuadAc(Tgn)agc | 4260 | CAAGAUAAAUUG | 2641 |
| 1964450 | GfAfgcuaguuasasu | | ucaAfuUfuaucususg | | AGCUAGUUAAG | |
| AD- | asasauu(Ghd)AfgCf | 3901 | asUfsgcdCu(Tgn)aac | 4261 | AUAAAUUGAGCU | 2722 |
| 1964454 | UfAfguuaaggcsasu | | uagCfuCfaauuusasu | | AGUUAAGGCAA | |
| AD- | asasuug(Ahd)GfcUf | 3902 | asUfsugdCc(Tgn)uaa | 4262 | UAAAUUGAGCUA | 2676 |
| 1964455 | AfGfuuaaggcasasu | | cuaGfcUfcaauususa | | GUUAAGGCAAA | |
| AD- | gsasgcu(Ahd)GfuUf | 3903 | asUfsgadTu(Tgn)gcc | 4263 | UUGAGCUAGUUA | 2620 |
| 1964459 | AfAfggcaaaucsasu | | uuaAfcUfagcucsasa | | AGGCAAAUCAG | |
| AD- | csusagu(Uhd)AfaGf | 3904 | asAfsccdTg(Agn)uuu | 4264 | AGCUAGUUAAGG | 2758 |
| 1964462 | GfCfaaaucaggsusu | | gccUfuAfacuagscsu | | CAAAUCAGGUA | |
| AD- | asgsuua(Ahd)GfgCf | 3905 | asUfsuadCc(Tgn)gau | 4265 | CUAGUUAAGGCA | 2638 |
| 1964464 | AfAfaucagguasasu | | uugCfcUfuaacusasg | | AAUCAGGUAAA | |
| AD- | usasagg(Chd)AfaAf | 3906 | asAfsuudTu(Agn)ccu | 4266 | GUUAAGGCAAAU | 2585 |
| 1964467 | UfCfagguaaaasusu | | gauUfuGfccuuasasc | | CAGGUAAAAUA | |
| AD- | asasggc(Ahd)AfaUf | 3907 | asUfsaudTu(Tgn)acc | 4267 | UUAAGGCAAAUC | 2628 |
| 1964468 | CfAfgguaaaausasu | | ugaUfuUfgccuusasa | | AGGUAAAAUAG | |
| AD- | gscsaaa(Uhd)CfaGf | 3908 | asGfsacdTa(Tgn)uuu | 4268 | AGGCAAAUCAGG | 2695 |
| 1964471 | GfUfaaaauaguscsu | | accUfgAfuuugcscsu | | UAAAAUAGUCA | |
| AD- | csasaau(Chd)AfgGf | 3909 | asUfsgadCu(Agn)uu | 4269 | GGCAAAUCAGGU | 2670 |
| 1964472 | UfAfaaauagucsasu | | uuacCfuGfauuugscsc | | AAAAUAGUCAU | |
| AD- | asasauc(Ahd)GfgUf | 3910 | asAfsugdAc(Tgn)auu | 4270 | GCAAAUCAGGUA | 2697 |
| 1964473 | AfAfaauagucasusu | | uuaCfcUfgauuusgsc | | AAAUAGUCAUG | |
| AD- | asuscag(Ghd)UfaAf | 3911 | asUfscadTg(Agn)cua | 4271 | AAAUCAGGUAAA | 2647 |
| 1964475 | AfAfuagucaugsasu | | uuuUfaCfcugaususu | | AUAGUCAUGAU | |
| AD- | csasggu(Ahd)AfaAf | 3912 | asAfsaudCa(Tgn)gac | 4272 | AUCAGGUAAAAU | 2626 |
| 1964477 | UfAfgucaugaususu | | uauUfuUfaccugsasu | | AGUCAUGAUUC | |
| AD- | asgsgua(Ahd)AfaUf | 3913 | asGfsaadTc(Agn)uga | 4273 | UCAGGUAAAAUA | 2660 |
| 1964478 | AfGfucaugauuscsu | | cuaUfuUfuaccusgsa | | GUCAUGAUUCU | |
| AD- | gsusaaa(Ahd)UfaGf | 3914 | asUfsagdAa(Tgn)cau | 4274 | AGGUAAAAUAGU | 2775 |
| 1964480 | UfCfaugauucusasu | | gacUfaUfuunacscsu | | CAUGAUUCUAU | |
| AD- | usasaaa(Uhd)AfgUf | 3915 | asAfsuadGa(Agn)uca | 4275 | GGUAAAAUAGUC | 2765 |
| 1964481 | CfAfugauucuasusu | | ugaCfuAfuuuuascsc | | AUGAUUCUAUG | |
| AD- | uscsaug(Ahd)UfuCf | 3916 | asUfsacdAu(Tgn)aca | 4276 | AGUCAUGAUUCU | 2598 |
| 1964489 | UfAfuguaaugusasu | | uagAfaUfcaugascsu | | AUGUAAUGUAA | |
| AD- | csasuga(Uhd)UfcUf | 3917 | asUfsuadCa(Tgn)uac | 4277 | GUCAUGAUUCUA | 2605 |
| 1964490 | AfUfguaauguasasu | | auaGfaAfucaugsasc | | UGUAAUGUAAA | |
| AD- | gsasuuc(Uhd)AfuGf | 3918 | asGfsgudTu(Agn)cau | 4278 | AUGAUUCUAUGU | 2689 |
| 1964493 | UfAfauguaaacscsu | | uacAfuAfgaaucsasu | | AAUGUAAACCA | |
| AD- | asusgac(Uhd)UfuUf | 3919 | asCfsucdTg(Tgn)aau | 4279 | UAAUGACUUUUG | 2654 |
| 1964551 | GfAfauuacagasgsu | | ucaAfaAfgucaususa | | AAUUACAGAGA | |
| AD- | gsascuu(Uhd)UfgAf | 3920 | asAfsucdTc(Tgn)gua | 4280 | AUGACUUUUGAA | 2716 |
| 1964553 | AfUfuacagagasusu | | auuCfaAfaagucsasu | | UUACAGAGAUA | |
| AD- | usasuaa(Uhd)UfaGf | 3921 | asGfsuadTc(Agn)caa | 4281 | GUUAUAAUUAGA | 2791 |
| 1964578 | AfGfuugugauascsu | | cucUfaAfuuauasasc | | GUUGUGAUACA | |
| AD- | usasauu(Ahd)GfaGf | 3922 | asCfsugdTa(Tgn)cac | 4282 | UAUAAUUAGAGU | 2786 |
| 1964580 | UfUfgugauacasgsu | | aacUfcUfaauuasusa | | UGUGAUACAGA | |
| AD- | asasuna(Ghd)AfgUf | 3923 | asUfscudGu(Agn)uca | 4283 | AUAAUUAGAGUU | 2685 |
| 1964581 | UfGfugauacagsasu | | caaCfuCfuaauusasu | | GUGAUACAGAG | |
| AD- | asusuag(Ahd)GfuUf | 3924 | asCfsucdTg(Tgn)auc | 4284 | UAAUUAGAGUUG | 2714 |
| 1964582 | GfUfgauacagasgsu | | acaAfcUfcuaaususa | | UGAUACAGAGU | |
| AD- | usasgag(Uhd)UfgUf | 3925 | asUfsacdTc(Tgn)gua | 4285 | AUUAGAGUUGUG | 2668 |
| 1964584 | GfAfuacagagusasu | | ucaCfaAfcucuasasu | | AUACAGAGUAU | |
| AD- | gsasguu(Ghd)UfgAf | 3926 | asUfsaudAc(Tgn)cug | 4286 | UAGAGUUGUGAU | 2666 |
| 1964586 | UfAfcagaguausasu | | uauCfaCfaacucsusa | | ACAGAGUAUAU | |
| AD- | gsusugu(Ghd)AfuAf | 3927 | asAfsaudAu(Agn)cuc | 4287 | GAGUUGUGAUAC | 2639 |
| 1964588 | CfAfgaguauaususu | | uguAfuCfacaacsusc | | AGAGUAUAUUU | |
| AD- | csasuuc(Ahd)GfaCf | 3928 | asUfsaudGa(Tgn)aua | 4288 | UCCAUUCAGACA | 2550 |
| 1964610 | AfAfuauaucausasu | | uugUfcUfgaaugsgsa | | AUAUAUCAUAA | |
| AD- | asusuca(Ghd)AfcAf | 3929 | asUfsuadTg(Agn)uau | 4289 | CCAUUCAGACAA | 2555 |
| 1964611 | AfUfauaucauasasu | | auuGfuCfugaausgsg | | UAUAUCAUAAC | |

### Example 2. In Vitro Screening of CA2 siRNA

### Experimental Methods

### Cell Culture and Transfections:

[0764] Hep3b or RPE-J cells (ATCC, Manassas, VA) are grown to near confluence at 37° C. in an atmosphere of 5% C02 in Eagle's Minimum Essential Medium (Gibco) supplemented with 10% FBS (ATCC) before being released from the plate by trypsinization. Transfection is carried out by adding 14.8 μL of Opti-MEM plus 0.2 μL of Lipofectamine RNAiMax per well (Invitrogen, Carlsbad CA. cat #13778-150) to 5 μL of each siRNA duplex to an individual well in a 96-well plate. The mixture is then incubated at room temperature for 15 minutes. Eighty μL of complete growth media without antibiotic containing ˜2×10⁴ Hep3B cells is then added to the siRNA mixture. Cells are incubated for 24 hours prior to RNA purification. Single dose experiments are performed at 10 nM, 1 nM and 0.1 nM final duplex concentration.

Total RNA Isolation Using DYNABEADS mRNA Isolation Kit:

[0765] Cells are lysed in 75 μL of Lysis/Binding Buffer containing 3 μL of beads per well and are mixed for 10 minutes on an electrostatic shaker. The washing steps are automated on a Biotek EL406, using a magnetic plate support. Beads are washed (in 90 μL) once in Buffer A, once in Buffer B, and twice in Buffer E, with aspiration steps in between. Following a final aspiration, complete 10 μL RT mixture is added to each well, as described below.

cDNA Synthesis Using ABI High Capacity cDNA Reverse Transcription Kit (Applied Biosystems, Foster City, CA, Cat #4368813):

[0766] A master mix of 1 μl 10× Buffer, 0.4 μl 25×dNTPs, 1 μL Random primers, 0.5 μL Reverse Transcriptase, 0.5 μL RNase inhibitor and 6.6 μL of H₂O per reaction is added per well. Plates are sealed, are agitated for 10 minutes on an electrostatic shaker, and then are incubated at 37 degrees C. for 2 hours. Following this, the plates are agitated at 80 degrees C. for 8 minutes.

### Real Time PCR:

[0767] Two microliter (μL) of cDNA is added to a master mix containing 0.5 μL of human GAPDH TaqMan Probe, 0.5 μL human CA2 probe, 2 μL nuclease-free water and 5 μL Lightcycler 480 probe master mix (Roche Cat #04887301001) per well in a 384 well plate (Roche cat #04887301001). Real time PCR is done in a LightCycler480 Real Time PCR system (Roche). Each duplex is tested at least two times and data are normalized to cells transfected with a non-targeting control siRNA. To calculate relative fold change, real time data are analyzed using the ΔΔCt method and are normalized to assays performed with cells transfected with a non-targeting control siRNA.

### Example 3. Single Dose In Vitro Screening of CA siRNAs

### Cell Culture and Transfections:

[0768] A253 cells or Hela cells were grown to near confluence at 37° C. in an atmosphere of 5% CO₂ in Eagle's Minimum Essential Medium (Gibco) supplemented with 10% FBS (ATCC) before being released from the plate by trypsinization. Transfection was carried out by adding 14.8 μL of Opti-MEM plus 0.2 μL of Lipofectamine RNAiMax per well (Invitrogen, Carlsbad CA. cat #13778-150) to 5 μL of each siRNA duplex to an individual well in a 96-well plate. The mixture was then incubated at room temperature for 15 minutes. Eighty μL of complete growth media without antibiotic containing ˜1.5×10⁴ A253 cells was then added to the siRNA mixture. Cells were incubated for 24 hours prior to RNA purification. A single dose experiment was performed at 10 nM final duplex concentration in A253 cells. For Hela cells, a multi-dose experiment was performed at 0.1 nM, 1 nM, and 10 nM final duplex concentration.

Total RNA Isolation Using DYNABEADS mRNA Isolation Kit:

[0769] Cells were lysed in 75 μL of Lysis/Binding Buffer containing 3 μL of beads per well and were mixed for 10 minutes on an electrostatic shaker. The washing steps were automated on a Biotek EL406, using a magnetic plate support. Beads were washed (in 90 μL) once in Buffer A, once in Buffer B, and twice in Buffer E, with aspiration steps in between. Following a final aspiration, complete 10 μL RT mixture was added to each well, as described below.

cDNA Synthesis Using ABI High Capacity cDNA Reverse Transcription Kit (Applied Biosystems, Foster City, CA, Cat #4368813):

[0770] A master mix of 1 μl 10× Buffer, 0.4 μl 25×dNTPs, 1 μL Random primers, 0.5 μL Reverse Transcriptase, 0.5 μL RNase inhibitor and 6.6 μL of H₂O per reaction was added per well. Plates were sealed, were agitated for 10 minutes on an electrostatic shaker, and then were incubated at 37 degrees C. for 2 hours. Following this, the plates were agitated at 80 degrees C. for 8 minutes.

### Real Time PCR:

[0771] Two microliter (μL) of cDNA was added to a master mix containing 0.5 μL of human GAPDH TaqMan Probe, 0.5 μL human CA2 probe, 2 μL nuclease-free water and 5 μL Lightcycler 480 probe master mix (Roche Cat #04887301001) per well in a 384 well plate (Roche cat #04887301001). Real time PCR is done in a LightCycler480 Real Time PCR system (Roche). Each duplex was tested at least two times and data were normalized to cells transfected with a non-targeting control siRNA. To calculate relative fold change, real time data were analyzed using the ΔΔCt method and were normalized to assays performed with cells transfected with a non-targeting control siRNA. The results for A253 cells are shown in Table 11 and the results for Hela cells are shown in Table 12. The results are presented as the pecent message remaining.

TABLE 11
CA2 Single Dose Screen in A253 Cells

| | % CA Message | | | % CA Message | |
|---|---|---|---|---|---|
| Duplex | Remaining | | Duplex | Remaining | |
| Name | Mean | SD | Name | Mean | SD |
| AD-1447598 | 7.20 | 0.47 | AD-1561130 | 70.78 | 12.81 |
| AD-1561703 | 6.89 | 0.25 | AD-1561122 | 7.10 | 1.78 |
| AD-1561694 | 9.47 | 0.96 | AD-1561116 | 7.00 | 1.56 |
| AD-1561686 | 11.90 | 0.80 | AD-1561112 | 8.15 | 5.14 |
| AD-1561679 | 9.05 | 0.73 | AD-1561106 | 26.09 | 6.97 |
| AD-1561651 | 8.50 | 0.24 | AD-1561100 | 3.10 | 0.99 |
| AD-1561613 | 9.92 | 0.47 | AD-1561092 | 3.09 | 0.86 |
| AD-1561601 | 10.70 | 1.11 | AD-1475424 | 18.12 | 4.10 |
| AD-1561591 | 8.82 | 0.65 | AD-1561072 | 28.20 | 2.22 |
| AD-1561581 | 8.17 | 0.73 | AD-1561066 | 6.47 | 1.72 |
| AD-1561570 | 9.46 | 1.69 | AD-1561056 | 6.94 | 1.51 |
| AD-1561562 | 9.92 | 1.09 | AD-1561050 | 5.54 | 1.17 |
| AD-1561551 | 6.50 | 1.45 | AD-1561043 | 21.07 | 1.67 |
| AD-1561542 | 9.21 | 0.97 | AD-1561037 | 9.53 | 1.21 |
| AD-1561534 | 9.59 | 0.36 | AD-1561031 | 33.42 | 2.51 |
| AD-1561527 | 9.25 | 1.54 | AD-1561015 | 7.38 | 0.60 |
| AD-1561521 | 8.37 | 0.27 | AD-1561009 | 15.37 | 1.80 |
| AD-1561513 | 13.07 | 1.38 | AD-1561002 | 50.31 | 2.37 |
| AD-1561504 | 9.70 | 0.78 | AD-1560996 | 7.63 | 0.53 |
| AD-1561498 | 8.73 | 1.80 | AD-1560989 | 74.31 | 4.13 |
| AD-1561489 | 10.24 | 1.19 | AD-1560976 | 5.17 | 0.44 |
| AD-1561478 | 10.18 | 1.11 | AD-1560970 | 8.59 | 3.64 |
| AD-1561471 | 11.22 | 1.21 | AD-1560963 | 6.77 | 3.46 |
| AD-1561465 | 15.01 | 1.09 | AD-1560954 | 27.23 | 5.41 |
| AD-1561456 | 40.43 | 3.66 | AD-1560948 | 26.42 | 0.76 |
| AD-1561450 | 24.74 | 1.42 | AD-1560941 | 6.44 | 1.39 |
| AD-1561444 | 17.51 | 2.01 | AD-1560930 | 27.16 | 6.71 |
| AD-1561433 | 11.61 | 0.78 | AD-1560921 | 5.44 | 1.37 |
| AD-1561422 | 8.20 | 0.63 | AD-1560915 | 5.44 | 1.54 |
| AD-1561414 | 10.20 | 0.58 | AD-1560904 | 89.40 | 10.68 |
| AD-1561408 | 6.88 | 0.89 | AD-1560895 | 37.15 | 2.86 |
| AD-1561402 | 8.58 | 1.21 | AD-1560892 | 5.67 | 1.90 |
| AD-1561396 | 20.33 | 6.80 | AD-1560880 | 48.60 | 7.79 |
| AD-1561390 | 7.95 | 1.75 | AD-1560874 | 10.82 | 1.27 |
| AD-1561384 | 15.34 | 3.97 | AD-1560862 | 14.92 | 1.69 |
| AD-1561378 | 16.76 | 4.22 | AD-1560843 | 33.98 | 3.79 |
| AD-1561366 | 20.14 | 5.16 | AD-1560851 | 4.79 | 0.38 |
| AD-1561360 | 11.28 | 1.92 | AD-1560845 | 20.26 | 2.36 |
| AD-1561349 | 10.47 | 3.67 | AD-1560837 | 9.58 | 0.89 |
| AD-1561342 | 19.22 | 2.75 | AD-1560816 | 11.19 | 0.83 |
| AD-1561336 | 6.48 | 2.35 | AD-1560810 | 10.58 | 1.27 |
| AD-1561327 | 7.80 | 0.93 | AD-1560804 | 9.93 | 1.78 |
| AD-1561319 | 5.93 | 1.03 | AD-1560798 | 11.16 | 1.31 |
| AD-1561313 | 6.39 | 0.67 | AD-1560792 | 5.26 | 0.83 |
| AD-1561306 | 6.03 | 0.49 | AD-1560783 | 2.91 | 0.76 |
| AD-1561300 | 5.62 | 0.50 | AD-1560777 | 6.73 | 1.62 |
| AD-1561294 | 3.77 | 1.38 | AD-1560765 | 31.74 | 3.45 |
| AD-1561285 | 6.79 | 0.61 | AD-1560759 | 7.85 | 2.77 |
| AD-1561279 | 5.80 | 0.61 | AD-1560752 | 23.53 | 6.36 |
| AD-1561272 | 5.68 | 0.49 | AD-1560745 | 13.34 | 2.85 |
| AD-1561261 | 6.74 | 1.09 | AD-1560735 | 53.63 | 10.67 |
| AD-1561254 | 5.60 | 1.23 | AD-1560726 | 6.10 | 0.45 |
| AD-1561245 | 7.01 | 1.68 | AD-1560720 | 43.72 | 14.97 |
| AD-1561239 | 6.15 | 1.94 | AD-1560711 | 6.65 | 0.92 |
| AD-1561231 | 6.36 | 1.73 | AD-1560701 | 29.81 | 3.54 |
| AD-1561225 | 8.26 | 1.82 | AD-1560693 | 5.41 | 0.94 |
| AD-1561218 | 4.88 | 1.54 | AD-1560684 | 4.00 | 0.86 |
| AD-1561210 | 3.65 | 0.76 | AD-1560678 | 20.06 | 5.49 |
| AD-1561203 | 4.31 | 0.92 | AD-1560672 | 11.26 | 3.35 |
| AD-1561196 | 7.63 | 1.46 | AD-1560665 | 11.82 | 2.15 |
| AD-1561190 | 10.83 | 1.95 | AD-1560655 | 21.40 | 3.19 |
| AD-1561181 | 7.36 | 1.12 | AD-1560644 | 18.35 | 1.71 |
| AD-1561175 | 2.23 | 0.49 | AD-1560638 | 27.36 | 7.62 |
| AD-1561168 | 6.44 | 1.74 | AD-1560628 | 22.60 | 5.09 |
| AD-1446763 | 4.73 | 1.43 | AD-1560622 | 40.19 | 10.35 |
| AD-1561158 | 4.31 | 1.24 | AD-1560617 | 21.41 | 5.73 |
| AD-1561152 | 11.35 | 3.57 | AD-1560600 | 19.85 | 2.56 |
| AD-1561146 | 9.71 | 2.38 | | | |

TABLE 12
CA2 Multi-Dose Screen in Hela Cells

| | % CA Message Remaining | | | | | |
|---|---|---|---|---|---|---|
| Duplex Name | 10 nM Mean | 10 nM SD | 1 nM Mean | 1 nM SD | 0.1 nM Mean | 0.1 nM SD |
| AD-1784188.1 | 7.4 | 3.9 | 10.7 | 1.5 | 12.3 | 2.5 |
| AD-1784196.1 | 13.2 | 2.7 | 15.8 | 6.5 | 32.2 | 9.4 |
| AD-1784204.1 | 15.1 | 4.8 | 21 | 4.8 | 37.4 | 7.7 |
| AD-1784211.1 | 10.4 | 3.2 | 10.1 | 3.7 | 16.5 | 3.5 |
| AD-1784218.1 | 6.4 | 1.6 | 13.3 | 3.2 | 21.4 | 2.9 |
| AD-1784226.1 | 23.8 | 2 | 21.9 | 4.3 | 46 | 9.3 |
| AD-1784233.1 | 15.7 | 3.2 | 19.1 | 5.9 | 34.6 | 6 |
| AD-1784241.1 | 30.1 | 5.7 | 39 | 6.6 | 48.9 | 16.8 |
| AD-1784249.1 | 12.6 | 3.1 | 13.9 | 4 | 28.2 | 8.1 |
| AD-1784256.1 | 15.6 | 3.3 | 19.4 | 4.4 | 23.8 | 1.9 |
| AD-1784263.1 | 22.8 | 5.4 | 25 | 6.5 | 31.2 | 11 |
| AD-1784271.1 | 14.7 | 4.4 | 10.8 | 1.8 | 15.6 | 2.3 |
| AD-1784189.1 | 17.4 | 4.3 | 12.2 | 3.8 | 25.9 | 1 |
| AD-1784197.1 | 24.4 | 4.7 | 29 | 6.7 | 33 | 5.5 |
| AD-1784205.1 | 18 | 2.7 | 22.2 | 9.6 | 40.1 | 9.3 |
| AD-1784212.1 | 23.8 | 3.8 | 13.9 | 2 | 30.6 | 6.8 |
| AD-1784219.1 | 13.1 | 5.1 | 12.4 | 2.4 | 26.9 | 4.1 |
| AD-1784227.1 | 20.3 | 4.4 | 15.1 | 2.9 | 28.9 | 9.1 |
| AD-1784234.1 | 22.1 | 3.9 | 24.6 | 10.6 | 35.3 | 12 |
| AD-1784242.1 | 38 | 3.1 | 41.7 | 8.6 | 50.6 | 7.7 |
| AD-1784250.1 | 18.2 | 3.5 | 20.4 | 8.5 | 31.7 | 9.6 |
| AD-1784257.1 | 15 | 4.8 | 14.4 | 5.9 | 24.5 | 9.9 |
| AD-1784264.1 | 23.5 | 6.6 | 22.8 | 9 | 30.6 | 6.1 |
| AD-1784272.1 | 15.3 | 5.1 | 13.8 | 7.1 | 26.8 | 6 |
| AD-1784190.1 | 8.8 | 3.4 | 10.5 | 1.5 | 18.2 | 4.8 |
| AD-1784198.1 | 24.4 | 4.1 | 25.4 | 5.1 | 23.4 | 8.2 |
| AD-1955 | 79.5 | 6.1 | | | | |
| AD-1784220.1 | 25.3 | 7.3 | 25.3 | 6.2 | 48.8 | 10.5 |
| AD-1784228.1 | 20.2 | 4.6 | 16.5 | 3.4 | 31.8 | 6.7 |
| AD-1784235.1 | 23.4 | 5.9 | 23.6 | 5.8 | 24.3 | 2.5 |
| AD-1784243.1 | 23 | 6.9 | 26.4 | 1.6 | 24.6 | 5.9 |
| AD-1784265.1 | 28.5 | 9.4 | 24.1 | 2.9 | 31.7 | 2.4 |
| AD-1784273.1 | 16.4 | 5.2 | 14.4 | 1.1 | 31.6 | 6.1 |
| AD-1784191.1 | 9.1 | 4.9 | 8.7 | 2.2 | 20.2 | 1.2 |
| AD-1784199.1 | 26.6 | 8.7 | 18 | 2.8 | 44.8 | 14.2 |
| AD-1784206.1 | 25.3 | 6.8 | 30.1 | 9.6 | 74.8 | 17.3 |
| AD-1784213.1 | 25.9 | 9.1 | 12.7 | 1.5 | 33.3 | 5.8 |
| AD-1784221.1 | 29.8 | 6 | 34.4 | 7.6 | 70.4 | 14.3 |
| AD-1784229.1 | 39.8 | 5.5 | 36.9 | 8.1 | 56.2 | 5.6 |
| AD-1784236.1 | 26.9 | 10 | 24.6 | 9 | 39.8 | 10.6 |
| AD-1784244.1 | 22.4 | 4.9 | 32.7 | 10.2 | 30 | 5.1 |
| AD-1784251.1 | 72.8 | 13.6 | 77.5 | 12.6 | 95.7 | 34 |
| AD-1784258.1 | 21.6 | 7.6 | 20.8 | 18 | 24 | 6.7 |
| AD-1784266.1 | 16.1 | 3.4 | 25.6 | 2.1 | 19.4 | 7.5 |
| AD-1784274.1 | 53.4 | 6.3 | 51.4 | 14.9 | 51.5 | 11.2 |
| AD-1784192.1 | 15.5 | 6 | 12.7 | 2.9 | 18.1 | 4.6 |
| AD-1784200.1 | 25.1 | 4.2 | 22 | 3.6 | 26.4 | 7.7 |
| AD-1784207.1 | 60.8 | 8.8 | 48.1 | 5.8 | 98.4 | 18.9 |
| AD-1784214.1 | 42.6 | 9.9 | 50.2 | 17.4 | 120.6 | 40.2 |
| AD-1784222.1 | 52.6 | 10.7 | 56.4 | 4.1 | 85.1 | 17.5 |
| AD-1784230.1 | 69.9 | 5.9 | 63.4 | 12.5 | 123.9 | 38.2 |
| AD-1784237.1 | 20.8 | 2.8 | 26.7 | 15.9 | 50.3 | 13.8 |
| AD-1784245.1 | 25 | 3.9 | 25.8 | 8.6 | 70.6 | 19.9 |
| AD-1784252.1 | 46.8 | 8.5 | 60.2 | 16.7 | 101.9 | 24.6 |
| AD-1784259.1 | 29.4 | 4.6 | 19.1 | 3.5 | 23.1 | 5 |
| AD-1784267.1 | 32.3 | 3.4 | 29.1 | 4.5 | 34.3 | 12.5 |
| AD-1784275.1 | 24.9 | 6.8 | 38.6 | 9.8 | 34.9 | 10.6 |
| AD-1784193.1 | 19.5 | 5.2 | 19 | 4.1 | 23.6 | 9 |
| AD-1784201.1 | 32.3 | 1.2 | 22.8 | 3.4 | 34.4 | 5.3 |
| AD-1784208.1 | 66.4 | 7.8 | 63.2 | 20.5 | 90.2 | 21.9 |
| AD-1784215.1 | 52.8 | 10.5 | 56.7 | 12.6 | 72.6 | 7.7 |
| AD-1784223.1 | 77.3 | 25.6 | 69.2 | 17.5 | 87 | 29.8 |
| AD-1784231.1 | 29.8 | 6.5 | 27.9 | 4.4 | 32.1 | 13.3 |
| AD-1784238.1 | 13.1 | 1.8 | 25.9 | 8.8 | 37.9 | 7.4 |
| AD-1784246.1 | 35.5 | 8.8 | 41.9 | 15.7 | 38.3 | 0.6 |
| AD-1784253.1 | 23.8 | 5.2 | 21.3 | 2.6 | 34.7 | 9.7 |
| AD-1784260.1 | 33.1 | 9.8 | 18.8 | 6.1 | 23.1 | 6.8 |
| AD-1784268.1 | 25.1 | 3 | 18.6 | 7.5 | 29.7 | 13.2 |
| AD-1784276.1 | 29.1 | 12.1 | 24.7 | 7.8 | 50 | 10.4 |
| AD-1784194.1 | 18.7 | 6.1 | 16.1 | 5.8 | 29.1 | 9.3 |
| AD-1784202.1 | 63 | 4.5 | 53.5 | 5.7 | 56.6 | 5.7 |
| AD-1784209.1 | 19.2 | 5.4 | 16.2 | 2 | 25.7 | 3 |
| AD-1784216.1 | 23.4 | 4.8 | 19.9 | 5.1 | 33.1 | 8.1 |
| AD-1784224.1 | 49.9 | 6.3 | 33.8 | 6 | 38.7 | 11 |
| AD-1784232.1 | 34.9 | 1.9 | 60.7 | 12.4 | 54.5 | 12.2 |
| AD-1784239.1 | 15.9 | 5.5 | 17.9 | 7.2 | 21.9 | 7.2 |
| AD-1784247.1 | 15.8 | 2.2 | 17 | 4.2 | 28.1 | 3.6 |
| AD-1784254.1 | 42.5 | 10.2 | 39.8 | 14.8 | 46.6 | 13.5 |
| AD-1784261.1 | 38.9 | 6.3 | 31.5 | 11.6 | 35.8 | 9.1 |
| AD-1784269.1 | 36.1 | 8.3 | 29.6 | 10.6 | 40.4 | 7.7 |
| AD-1784277.1 | 15.5 | 4.4 | 19.8 | 8.5 | 20 | 8.6 |
| AD-1784195.1 | 13.1 | 5.3 | 13 | 5.1 | 19.6 | 2.6 |
| AD-1784203.1 | 43.5 | 5.1 | 24.6 | 2.5 | 43.5 | 13.4 |
| AD-1784210.1 | 18.7 | 2.3 | 17.4 | 6.4 | 36.2 | 8.5 |
| AD-1784217.1 | 44 | 7.8 | 33.4 | 10.7 | 61.5 | 19.7 |
| AD-1784225.1 | 49.9 | 9.5 | 53.3 | 17.1 | 59.7 | 18.9 |
| AD-1784240.1 | 25 | 7.5 | 21.4 | 11.6 | 46.1 | 9 |
| AD-1784248.1 | 36.8 | 10.1 | 20.4 | 4.5 | 76.8 | 12 |
| AD-1784255.1 | 60.4 | 14.7 | 54.7 | 21.1 | 65.3 | 16.7 |
| AD-1784262.1 | 13.4 | 3 | 27.9 | 8 | 40 | 12 |
| AD-1784270.1 | 39.5 | 11.6 | 41.7 | 12.8 | 28.2 | 4.8 |
| AD-1784458.1 | 26.6 | 1 | 22.6 | 7 | 22.6 | 7 |
| AD-1784466.1 | 26 | 3.1 | 18 | 4.6 | 24.1 | 6 |
| AD-1784474.1 | 12.5 | 2.3 | 18.1 | 5.2 | 16.5 | 4 |
| AD-1784481.1 | 13.8 | 3.9 | 17.3 | 3 | 25.2 | 6 |
| AD-1784488.1 | 10.2 | 4.6 | 14.4 | 5.8 | 21.4 | 4.2 |
| AD-1784496.1 | 24.7 | 5.8 | 50.6 | 4 | 69.1 | 14.9 |
| AD-1784503.1 | 31.4 | 4.6 | 64.7 | 18.4 | 67.8 | 10.3 |
| AD-1784511.1 | 17.8 | 0.7 | 23.5 | 4.8 | 54 | 13.8 |
| AD-1784519.1 | 39.7 | 9.7 | 52.2 | 12.3 | 56.2 | 10.2 |
| AD-1784526.1 | 37 | 6.1 | 48.6 | 12.4 | 51.2 | 2.4 |
| AD-1784533.1 | 12 | 3.5 | 16.4 | 6 | 38.2 | 10 |
| AD-1784541.1 | 59.3 | 13.2 | 34.8 | 5.8 | 42.1 | 10.2 |
| AD-1784459.1 | 42.7 | 10.2 | 38.4 | 3.4 | 51 | 7.4 |
| AD-1784467.1 | 16.9 | 4.3 | 27.8 | 4.5 | 46.5 | 13 |
| AD-1784475.1 | 16.9 | 1.8 | 14.4 | 4.8 | 21.2 | 3.9 |
| AD-1784482.1 | 24.8 | 4.6 | 29.8 | 6.6 | 59.6 | 15.2 |
| AD-1784489.1 | 25.7 | 5.1 | 20.6 | 5 | 38.5 | 6.4 |
| AD-1784497.1 | 66.4 | 18.4 | 67.3 | 7.6 | 74 | 15.3 |
| AD-1784504.1 | 13.5 | 4.5 | 25.1 | 9.6 | 24.3 | 3.4 |
| AD-1784512.1 | 37.7 | 10.7 | 41.8 | 10.5 | 46.7 | 15.9 |
| AD-1784520.1 | 11.1 | 3.9 | 22.5 | 4.7 | 28.1 | 7.2 |
| AD-1784527.1 | 30.6 | 9.3 | 36.9 | 9.6 | 45.4 | 22.2 |
| AD-1784534.1 | 13.9 | 5.7 | 20.4 | 4.7 | 32.5 | 8.9 |
| AD-1784542.1 | 22.2 | 4.1 | 13.8 | 5.1 | 28.3 | 11.9 |
| AD-1784460.1 | 13.5 | 1.3 | 21.2 | 2.6 | 24.3 | 5.6 |
| AD-1784468.1 | 36.4 | 8.5 | 44.7 | 8.5 | 53.6 | 13.7 |
| AD-1784490.1 | 29.2 | 9.6 | 24.4 | 6.3 | 38.9 | 5.5 |
| AD-1784498.1 | 51.8 | 4.2 | 71.4 | 5.6 | 96.9 | 3.5 |
| AD-1784505.1 | 31 | 9.6 | 50.9 | 5.9 | 46.1 | 3.5 |
| AD-1784513.1 | 57.4 | 14.8 | 51.5 | 9.9 | 63 | 4.5 |
| AD-1784535.1 | 42.5 | 8.8 | 30.3 | 5.2 | 53.9 | 5.1 |
| AD-1784543.1 | 14 | 0.5 | 28.9 | 4.1 | 46.4 | 4.1 |
| AD-1784461.1 | 18 | 5.7 | 17.5 | 5.4 | 23 | 6.2 |
| AD-1784469.1 | 72.7 | 13.2 | 65.3 | 10 | 44.9 | 8.2 |
| AD-1784476.1 | 29.9 | 5.5 | 36.7 | 4.8 | 54.1 | 7.2 |
| AD-1784483.1 | 34.4 | 3.4 | 52.9 | 12.9 | 71.4 | 10.3 |
| AD-1784491.1 | 30.9 | 8.7 | 44.5 | 11.3 | 78.2 | 16.1 |
| AD-1784499.1 | 132.2 | 30.7 | 91.9 | 28.5 | 114.8 | 20.2 |
| AD-1784506.1 | 51 | 16.8 | 78.8 | 22 | 108.9 | 26.3 |
| AD-1784514.1 | 26.4 | 8.4 | 38.8 | 4.9 | 36.9 | 15.8 |
| AD-1784521.1 | 58.5 | 16 | 71.2 | 12.6 | 98.8 | 18 |
| AD-1784528.1 | 47.6 | 6.6 | 56.7 | 13 | 69.4 | 9 |
| AD-1784536.1 | 74.9 | 11.5 | 43.2 | 9.4 | 107.7 | 31.8 |
| AD-1784544.1 | 39.1 | 6.3 | 74.5 | 3.5 | 65. | 21.6 |
| AD-1784462.1 | 19.1 | 1.2 | 22.1 | 0.5 | 25.4 | 2.8 |
| AD-1784470.1 | 35.1 | 10 | 45.4 | 11.7 | 64.1 | 11.1 |
| AD-1784477.1 | 33.1 | 7.8 | 45.5 | 7.3 | 60.3 | 6.7 |
| AD-1784484.1 | 24.3 | 2.4 | 28.7 | 3.4 | 39.9 | 1.8 |
| AD-1784492.1 | 48.1 | 13.1 | 56.6 | 12 | 82.4 | 10.4 |
| AD-1784500.1 | 40.3 | 6.9 | 33.4 | 16.8 | 58.6 | 1 |
| AD-1784507.1 | 47.2 | 13.5 | 62.6 | 20.5 | 71.9 | 13.1 |
| AD-1784515.1 | 29.1 | 1.9 | 59.6 | 19.7 | 86.9 | 25.1 |
| AD-1784522.1 | 29.6 | 4.9 | 38.4 | 0.8 | 61.1 | 20.6 |
| AD-1784529.1 | 98.4 | 22.8 | 88.5 | 20.4 | 64.6 | 15.5 |
| AD-1784537.1 | 20.5 | 8.2 | 18.2 | 6.6 | 55.7 | 5.6 |
| AD-1784545.1 | 38 | 10.1 | 26 | 2.8 | 58.3 | 10.4 |
| AD-1784463.1 | 50 | 15.3 | 58 | 10.4 | 52.4 | 6.6 |
| AD-1784471.1 | 30.1 | 2.1 | 47.8 | 10.7 | 50.3 | 7.1 |
| AD-1784478.1 | 53.8 | 8.6 | 64.9 | 8.3 | 68.1 | 15.6 |
| AD-1784485.1 | 23.8 | 7.1 | 28.5 | 8.5 | 32.9 | 4.9 |
| AD-1784493.1 | 34.5 | 10.1 | 33.5 | 11.7 | 48.4 | 14.7 |
| AD-1784501.1 | 78.8 | 20.3 | 70.4 | 28.6 | 89.6 | 23.1 |
| AD-1784508.1 | 21.4 | 5.8 | 46 | 9.5 | 42.5 | 19.5 |
| AD-1784516.1 | 31.1 | 5.7 | 66.3 | 17.3 | 76 | 24.5 |
| AD-1784523.1 | 40.9 | 13 | 60.2 | 12.3 | 70.1 | 21.4 |
| AD-1784530.1 | 61.2 | 18.8 | 62.2 | 10.8 | 63.8 | 18.8 |
| AD-1784538.1 | 79.1 | 26.9 | 73.2 | 13.2 | 73.8 | 38.3 |
| AD-1784546.1 | 21.9 | 7.1 | 17.3 | 7.3 | 40 | 13.6 |
| AD-1784464.1 | 44.3 | 8.1 | 50.6 | 15.3 | 71.4 | 11.4 |
| AD-1784472.1 | 26.5 | 3.8 | 29.7 | 8.7 | 29.5 | 6.5 |
| AD-1784479.1 | 26.6 | 3.9 | 38.9 | 6.4 | 58.9 | 16.9 |
| AD-1784486.1 | 26.2 | 8.9 | 50.5 | 10.7 | 47.6 | 11.2 |
| AD-1784494.1 | 25.2 | 6.6 | 54.1 | 16.8 | 40.7 | 10.5 |
| AD-1784502.1 | 93.8 | 15.5 | 74.6 | 20.4 | 92.5 | 26.3 |
| AD-1784509.1 | 45 | 6.2 | 41.3 | 11.5 | 60.7 | 15.7 |
| AD-1784517.1 | 29 | 7.6 | 30.4 | 6.9 | 48.9 | 11.3 |
| AD-1784524.1 | 77 | 23.1 | 75 | 23.6 | 75.9 | 26.8 |
| AD-1784531.1 | 43.8 | 7.1 | 38 | 12.8 | 92.8 | 22.1 |
| AD-1784539.1 | 30.5 | 4 | 27.7 | 22 | 50 | 16.9 |
| AD-1784547.1 | 25.3 | 1.2 | 22.8 | 6.8 | 46.3 | 18.8 |
| AD-1784465.1 | 30.6 | 7.8 | 45.5 | 11.9 | 46.5 | 15.2 |
| AD-1784473.1 | 27.4 | 5.4 | 26.3 | 7.3 | 44.9 | 6.6 |
| AD-1784480.1 | 47.5 | 9.9 | 67.9 | 13.8 | 60.1 | 13.6 |
| AD-1784487.1 | 34 | 12.8 | 37.3 | 7.1 | 45.5 | 13 |
| AD-1784495.1 | 37 | 6.7 | 79.2 | 22.2 | 74.7 | 6 |
| AD-1784510.1 | 26.5 | 6.6 | 23 | 4.8 | 36.1 | 11.5 |
| AD-1784518.1 | 48.2 | 13.8 | 82.2 | 12.4 | 82.7 | 23.5 |
| AD-1784525.1 | 78.7 | 25.6 | 103 | 34.2 | 88.9 | 21.9 |
| AD-1784532.1 | 29.5 | 4.2 | 32.4 | 8.7 | 53.5 | 24.5 |
| AD-1784540.1 | 106.9 | 27.5 | 86.8 | 21 | 94.4 | 31.8 |
| AD-1784278.1 | 15 | 3.3 | 15 | 8.5 | 23.3 | 7.1 |
| AD-1784286.1 | 12.7 | 4.1 | 16.3 | 5.2 | 24.7 | 2.7 |
| AD-1784294.1 | 31.7 | 2.9 | 41.4 | 6.9 | 36.7 | 6.6 |
| AD-1784301.1 | 60.4 | 9.6 | 73.2 | 11.8 | 71.4 | 13 |
| AD-1784308.1 | 11 | 3.4 | 18 | 3.2 | 38.8 | 10 |
| AD-1784316.1 | 15.4 | 4.2 | 20.5 | 3.3 | 40.3 | 2.7 |
| AD-1784323.1 | 21.2 | 7.5 | 36.4 | 7.3 | 33.9 | 6.6 |
| AD-1784331.1 | 17.2 | 7.4 | 31.7 | 8.2 | 31 | 4.5 |
| AD-1784339.1 | 17.6 | 5.5 | 19.4 | 2.8 | 8.4 | 3.2 |
| AD-1784346.1 | 13.1 | 3.3 | 13.6 | 3 | 23.4 | 6.1 |
| AD-1784353.1 | 12.1 | 8.1 | 10.2 | 3.6 | 13.3 | 3.2 |
| AD-1784361.1 | 14.9 | 5.8 | 12.1 | 2.5 | 24.5 | 7.5 |
| AD-1784279.1 | 12.3 | 3.6 | 20.4 | 6.3 | 31.4 | 7 |
| AD-1784287.1 | 47.8 | 10.5 | 45.7 | 1.1 | 45.4 | 7.3 |
| AD-1784295.1 | 13.3 | 4 | 14.5 | 6.5 | 15.5 | 4.9 |
| AD-1784302.1 | 19.3 | 2.7 | 20.5 | 3.4 | 22.7 | 6.8 |
| AD-1784309.1 | 26.9 | 4.8 | 26.6 | 4.2 | 39.7 | 8.7 |
| AD-1784317.1 | 14.4 | 7.6 | 20 | 3 | 64.2 | 16.2 |
| AD-1784324.1 | 30.4 | 7.3 | 53.2 | 11.4 | 24.8 | 6.9 |
| AD-1784332.1 | 9.6 | 4.1 | 23 | 9.5 | 37.7 | 8 |
| AD-1784340.1 | 29.8 | 10.4 | 38.4 | 14 | 43.4 | 28.7 |
| AD-1784347.1 | 14.4 | 4 | 17.4 | 7.3 | 37.9 | 15 |
| AD-1784354.1 | 28.4 | 11.4 | 29.5 | 7.4 | 31.9 | 5.5 |
| AD-1784362.1 | 12.1 | 8.6 | 22.4 | 10.6 | 29.3 | 12.1 |
| AD-1784280.1 | 19.6 | 6.7 | 22.4 | 3.1 | 33.9 | 11.5 |
| AD-1784288.1 | 26.4 | 6.3 | 44.4 | 8.1 | 60.3 | 12.2 |
| AD-1784310.1 | 19.6 | 5.7 | 51.2 | 12.8 | 60.7 | 14.6 |
| AD-1784318.1 | 53 | 9.7 | 114.8 | 43.9 | 84.4 | 10.1 |
| AD-1784325.1 | 26.7 | 5.8 | 36.3 | 11.1 | 38.3 | 12.7 |
| AD-1784333.1 | 18.6 | 5.9 | 35.7 | 4.7 | 38.1 | 7.4 |
| AD-1784355.1 | 23.2 | 6.1 | 28.6 | 6.8 | 50.3 | 8.3 |
| AD-1784363.1 | 11.2 | 5.6 | 19.2 | 7.6 | 28.5 | 4.7 |
| AD-1784281.1 | 15.1 | 5.9 | 16.4 | 4.3 | 23.1 | 3.1 |
| AD-1784289.1 | 53.4 | 10.1 | 43.7 | 7.6 | 60.6 | 12.1 |
| AD-1784296.1 | 60.6 | 10.9 | 36.5 | 9.4 | 85.8 | 22 |
| AD-1784303.1 | 32.1 | 6.8 | 38.6 | 1 | 38.6 | 4.1 |
| AD-1784311.1 | 40.2 | 4 | 43.2 | 13.1 | 81.6 | 8.8 |
| AD-1784319.1 | 28.7 | 2.4 | 26.5 | 0.3 | 50 | 17.6 |
| AD-1784326.1 | 35.8 | 8.3 | 41.8 | 5.9 | 65.1 | 16.4 |
| AD-1784334.1 | 36 | 9 | 55.2 | 12.1 | 46.5 | 10.9 |
| AD-1784341.1 | 38.6 | 8.8 | 40.7 | 8.4 | 40.2 | 8.8 |
| AD-1784348.1 | 23 | 9.2 | 28.2 | 3 | 44.5 | 7.6 |
| AD-1784356.1 | 18.1 | 8.1 | 23 | 7.4 | 39.7 | 6.8 |
| AD-1784364.1 | 14.2 | 6.5 | 18.3 | 10.7 | 36.7 | 21.7 |
| AD-1784282.1 | 20.5 | 3.7 | 24.7 | 2 | 25 | 4.1 |
| AD-1784290.1 | 32.9 | 6.2 | 34 | 7.9 | 36.1 | 6 |
| AD-1784297.1 | 56.2 | 6.6 | 52.3 | 8.1 | 50.5 | 13.6 |
| AD-1784304.1 | 98.2 | 9.8 | 101.8 | 9.5 | 103.8 | 13.7 |
| AD-1784312.1 | 42.8 | 2.3 | 43.7 | 9.7 | 72.8 | 15 |
| AD-1784320.1 | 41.8 | 4.3 | 39.3 | 7.5 | 83.3 | 18.2 |
| AD-1784327.1 | 26.3 | 2.8 | 32.9 | 6.2 | 59.8 | 4.9 |
| AD-1784335.1 | 21.6 | 2 | 48.9 | 9.4 | 46.4 | 11.9 |
| AD-1784342.1 | 24.9 | 9.4 | 36.3 | 6.1 | 34.4 | 8.4 |
| AD-1784349.1 | 19.7 | 7.5 | 22.5 | 3.5 | 35.8 | 7.1 |
| AD-1784357.1 | 17 | 4.8 | 31 | 8.8 | 51.7 | 14.1 |
| AD-1784365.1 | 31.2 | 1.9 | 59.4 | 3.9 | 58.6 | 5.5 |
| AD-1784283.1 | 25.7 | 4.6 | 27.4 | 10.2 | 22.1 | 6.4 |
| AD-1784291.1 | 24.8 | 5.1 | 19.6 | 7.4 | 34.5 | 10.2 |
| AD-1784298.1 | 23.1 | 6.2 | 29.6 | 11.7 | 27.2 | 4.1 |
| AD-1784305.1 | 28.8 | 7.3 | 23.2 | 2.8 | 27.8 | 9.7 |
| AD-1784313.1 | 34.9 | 7.8 | 31.9 | 7.4 | 43.1 | 6.1 |
| AD-1784321.1 | 31.1 | 9.4 | 39.2 | 2.6 | 55.4 | 8.6 |
| AD-1784328.1 | 40.5 | 9.9 | 50.2 | 8.3 | 60.2 | 11.1 |
| AD-1784336.1 | 20 | 5.8 | 36 | 5.3 | 33.7 | 9.5 |
| AD-1784343.1 | 20.7 | 1.8 | 30.4 | 9.1 | 61.8 | 7.4 |
| AD-1784350.1 | 17.4 | 9.9 | 34.4 | 7.8 | 84.8 | 9.2 |
| AD-1784358.1 | 20.2 | 11 | 19.2 | 1.7 | 42.8 | 11.8 |
| AD-1784366.1 | 20.4 | 10.9 | 19.2 | 4.6 | 38 | 13.3 |
| AD-1784284.1 | 33.2 | 9.7 | 32 | 1.1 | 33.5 | 0.6 |
| AD-1784292.1 | 23.7 | 6.8 | 31.7 | 6.1 | 38.5 | 12.6 |
| AD-1784299.1 | 30.4 | 6.8 | 34.9 | 10.4 | 36.9 | 1.9 |
| AD-1784306.1 | 34.2 | 8.6 | 45.3 | 8.1 | 52.9 | 6.8 |
| AD-1784314.1 | 46.2 | 11.5 | 87.7 | 7.7 | 54.5 | 3.2 |
| AD-1784322.1 | 43 | 9.2 | 83.4 | 10 | 94.9 | 20.4 |
| AD-1784329.1 | 15.8 | 6.1 | 30.4 | 10.4 | 39.8 | 11.8 |
| AD-1784337.1 | 29.3 | 7.8 | 42.1 | 10.5 | 46.3 | 15.9 |
| AD-1784344.1 | 45.4 | 15.2 | 33.3 | 1.3 | 50.7 | 22.5 |
| AD-1784351.1 | 20.5 | 10.4 | 28.2 | 8.4 | 47.8 | 12.7 |
| AD-1784359.1 | 14.2 | 1.3 | 42.2 | 12.6 | 33.8 | 4.8 |
| AD-1784367.1 | 16.3 | 7.9 | 25.2 | 9 | 27.4 | 5.7 |
| AD-1784285.1 | 24 | 3.7 | 19.1 | 1.5 | 21.5 | 3.3 |
| AD-1784293.1 | 26.2 | 5.4 | 21.3 | 5 | 18 | 3.7 |
| AD-1784300.1 | 24.3 | 6.9 | 38.7 | 6 | 36.8 | 7.1 |
| AD-1784307.1 | 32.9 | 8.2 | 52.5 | 8.6 | 44.3 | 10.1 |
| AD-1784315.1 | 25 | 12.1 | 64.4 | 10.2 | 69.2 | 18.3 |
| AD-1784330.1 | 27.8 | 8.9 | 35.1 | 2.7 | 45.7 | 1.2 |
| AD-1784338.1 | 24.4 | 10.8 | 36 | 7.2 | 49.5 | 13.8 |
| AD-1784345.1 | 23.7 | 9.6 | 45.3 | 10.6 | 64.7 | 19 |
| AD-1784352.1 | 16.5 | 7.1 | 26.5 | 7.6 | 46.6 | 12.4 |
| AD-1784360.1 | 23.4 | 1.2 | 66.1 | 14.9 | 66.1 | 21 |
| AD-1784368.1 | 8.6 | 2.2 | 12.6 | 3.6 | 21.5 | 2.2 |
| AD-1784384.1 | 14.5 | 5.4 | 37.3 | 9.8 | 34 | 1 |
| AD-1784391.1 | 16.2 | 1.8 | 24.6 | 5.6 | 22.9 | 4.1 |
| AD-1784398.1 | 18.9 | 4.3 | 18.8 | 2.3 | 8.4 | 2.1 |
| AD-1784406.1 | 36.1 | 9.8 | 45 | 18.6 | 38.2 | 7.6 |
| AD-1784413.1 | 23 | 3.3 | 16 | 3 | 36.4 | 7.9 |
| AD-1784421.1 | 22.8 | 3.3 | 16.1 | 3.3 | 25 | 1.9 |
| AD-1784429.1 | 16.9 | 3.4 | 18.1 | 5 | 34 | 6.9 |
| AD-1784436.1 | 13.5 | 6.2 | 35.1 | 3.6 | 32.5 | 9.4 |
| AD-1784443.1 | 22 | 9 | 28.9 | 6.6 | 50.3 | 11.5 |
| AD-1784451.1 | 16.9 | 7.2 | 19.3 | 5.7 | 21.4 | 4.2 |
| AD-1784369.1 | 15 | 2.7 | 12.4 | 1.8 | 22.6 | 2.8 |
| AD-1784377.1 | 32.5 | 2.8 | 33.4 | 8 | 33.1 | 9.4 |
| AD-1784385.1 | 25.6 | 3.2 | 65.1 | 20.8 | 41.5 | 11.3 |
| AD-1784392.1 | 20.2 | 4.1 | 59.2 | 11.1 | 43.3 | 18.8 |
| AD-1784399.1 | 30.8 | 9.1 | 31.2 | 3.8 | 19.9 | 4.9 |
| AD-1784407.1 | 35.6 | 9.6 | 35.1 | 2.8 | 31.5 | 4.6 |
| AD-1784414.1 | 35.5 | 7.8 | 30.7 | 3.5 | 34 | 13 |
| AD-1784422.1 | 10.8 | 1.4 | 17.8 | 3.2 | 21.8 | 8.1 |
| AD-1784430.1 | 13.5 | 3.5 | 21.2 | 7.5 | 21.2 | 4.9 |
| AD-1784437.1 | 25.3 | 8.1 | 37.8 | 5.8 | 35.1 | 8.3 |
| AD-1784444.1 | 11.2 | 5.6 | 18.3 | 3 | 15.4 | 3.5 |
| AD-1784452.1 | 10.7 | 4.9 | 12.4 | 6.2 | 22.5 | 9.2 |
| AD-1784370.1 | 24.4 | 6.4 | 24.3 | 3.1 | 34.7 | 11 |
| AD-1784378.1 | 14.2 | 5.7 | 41.9 | 13.1 | 32.7 | 7.7 |
| AD-1784400.1 | 55.7 | 12.3 | 87.4 | 16.5 | 66.6 | 14 |
| AD-1784408.1 | 81.7 | 21.8 | 88 | 18.2 | 46.2 | 1.5 |
| AD-1784415.1 | 74.8 | 15.3 | 74.9 | 18.4 | 89 | 12.7 |
| AD-1784423.1 | 30.1 | 5 | 30.7 | 4.7 | 43.6 | 6.3 |
| AD-1784445.1 | 25.5 | 2.7 | 39.5 | 11.1 | 39.3 | 10.9 |
| AD-1784453.1 | 31.2 | 6.5 | 26.4 | 11.6 | 17.6 | 7 |
| AD-1784371.1 | 24.2 | 1.9 | 25.7 | 7.1 | 36.4 | 5 |
| AD-1784379.1 | 32.9 | 3.3 | 60 | 13.9 | 59.7 | 12.1 |
| AD-1784386.1 | 32.7 | 2.9 | 54.2 | 15.7 | 48.7 | 21.5 |
| AD-1784393.1 | 33.8 | 3.6 | 46.8 | 15.6 | 34.8 | 7.6 |
| AD-1784401.1 | 51.3 | 15.2 | 63.4 | 28.2 | 45.8 | 7 |
| AD-1784409.1 | 72.2 | 8.5 | 79.6 | 20.1 | 54.6 | 12.5 |
| AD-1784416.1 | 42.4 | 12.3 | 55.9 | 16.2 | 48.9 | 2.7 |
| AD-1784424.1 | 22.9 | 7.1 | 49.6 | 21.5 | 50.4 | 10.4 |
| AD-1784431.1 | 20.1 | 3.5 | 36.3 | 6.3 | 52.1 | 10.2 |
| AD-1784438.1 | 34.1 | 9.1 | 36.6 | 9.3 | 39.7 | 8.4 |
| AD-1784446.1 | 43.4 | 8.7 | 63.9 | 10.2 | 88 | 24.2 |
| AD-1784454.1 | 33.2 | 9.2 | 22.5 | 3.3 | 33.8 | 11.6 |
| AD-1784372.1 | 22.8 | 3.7 | 29.4 | 6.7 | 24.2 | 3.2 |
| AD-1784380.1 | 53.5 | 18.4 | 80.5 | 9.8 | 70.8 | 13.8 |
| AD-1784387.1 | 28.5 | 5.4 | 53.4 | 27.4 | 51 | 1.9 |
| AD-1784394.1 | 34 | 5.9 | 92.8 | 24.5 | 70.6 | 8.4 |
| AD-1784402.1 | 43.7 | 6.3 | 65.4 | 16.2 | 42.8 | 14.7 |
| AD-1784410.1 | 77.9 | 12.3 | 106.6 | 26.1 | 82.8 | 7.8 |
| AD-1784417.1 | 25.2 | 6.8 | 45.4 | 7.9 | 53.3 | 12.4 |
| AD-1784425.1 | 30.4 | 9 | 40.5 | 12 | 39.3 | 8.8 |
| AD-1784432.1 | 63 | 17.4 | 64 | 19.8 | 70.6 | 13.2 |
| AD-1784439.1 | 37.6 | 9.1 | 46.9 | 15.2 | 44.7 | 12.9 |
| AD-1784447.1 | 32.4 | 8.1 | 50.5 | 19.1 | 44.2 | 2.2 |
| AD-1784455.1 | 42.7 | 11.6 | 60.9 | 3.1 | 75.9 | 12.2 |
| AD-1784373.1 | 15.7 | 5.9 | 37.1 | 13.7 | 40.8 | 4.7 |
| AD-1784381.1 | 47.1 | 12.1 | 106.9 | 9.6 | 71.4 | 9.2 |
| AD-1784388.1 | 32.2 | 5.6 | 38.4 | 8.6 | 27.9 | 8.8 |
| AD-1784395.1 | 31 | 8.3 | 69.2 | 8.8 | 32.7 | 9.5 |
| AD-1784403.1 | 27.2 | 10.8 | 88 | 15.5 | 40.6 | 6.6 |
| AD-1784411.1 | 27.8 | 3.2 | 47.3 | 3.6 | 48.6 | 7.1 |
| AD-1784418.1 | 22.6 | 0.5 | 62.9 | 8.9 | 68.7 | 23.1 |
| AD-1784426.1 | 26.2 | 8 | 37.5 | 9.8 | 33.7 | 9.7 |
| AD-1784433.1 | 70.9 | 22.4 | 76.7 | 28.8 | 55 | 13.4 |
| AD-1784440.1 | 29.5 | 8.3 | 36.7 | 11.7 | 43.7 | 12.9 |
| AD-1784448.1 | 47.4 | 15 | 43.2 | 16.8 | 62.6 | 21.7 |
| AD-1784456.1 | 15 | 0.8 | 35.8 | 6.5 | 25 | 7 |
| AD-1784382.1 | 26 | 7.1 | 57.6 | 27 | 45.1 | 11.4 |
| AD-1784389.1 | 29.6 | 8.3 | 64.5 | 11.1 | 55.9 | 2.4 |
| AD-1784396.1 | 33.6 | 8.3 | 73.3 | 13.1 | 46.8 | 7.8 |
| AD-1784404.1 | 28.3 | 5.6 | 45.7 | 10.2 | 58.1 | 10.2 |
| AD-1784412.1 | 46.9 | 16.2 | 97.1 | 12.2 | 79.9 | 16.7 |
| AD-1784419.1 | 20.5 | 5.4 | 58 | 6.9 | 36.9 | 7.6 |
| AD-1784427.1 | 55.7 | 13.1 | 56.5 | 5.6 | 67.5 | 11.8 |
| AD-1784434.1 | 37.8 | 0 | 41 | 13.1 | 45.1 | 8.4 |
| AD-1784441.1 | 64.6 | 22 | 106.3 | 18.5 | 79.5 | 23.7 |
| AD-1784449.1 | 18.9 | 3.4 | 55.5 | 5.4 | 35.6 | 4 |
| AD-1784457.1 | 24.8 | 10.7 | 39.5 | 16.5 | 54.1 | 10.8 |
| AD-1784375.1 | 23.4 | 10.5 | 32 | 1.7 | 45.8 | 11.2 |
| AD-1784383.1 | 23.3 | 5.7 | 42.7 | 18.5 | 54 | 12.9 |
| AD-1784390.1 | 30.9 | 6.4 | 72.2 | 22.6 | 50 | 16.2 |
| AD-1784397.1 | 25.4 | 4.2 | 33.6 | 9.5 | 30.1 | 6.1 |
| AD-1784405.1 | 65.2 | 19 | 143.6 | 50.9 | 110.5 | 38.4 |
| AD-1784420.1 | 22.4 | 3.6 | 29.8 | 6.2 | 52.2 | 11.2 |
| AD-1784428.1 | 22.1 | 2.2 | 55.9 | 15.1 | 54.5 | 2.3 |
| AD-1784435.1 | 26.4 | 11.1 | 81.9 | 10.3 | 43.4 | 0.5 |
| AD-1784442.1 | 23.9 | 7.1 | 46.6 | 13.4 | 40.5 | 13.5 |
| AD-1784450.1 | 20 | 0.8 | 46.5 | 12 | 47.3 | 14.6 |

CA2 Sequences
>NM_000067.3 Homo sapiens carbonic anhydrase
2 (CA2), transcript variant 1, mRNA
SEQ ID NO: 1
ACACAGTGCAGGCGCCCAAGCCGCCGCCGCCAGATCGGTGCCGATTCCTG
CCCTGCCCCGACCGCCAGCGCGACCATGTCCCATCACTGGGGGTACGGCA
AACACAACGGACCTGAGCACTGGCATAAGGACTTCCCCATTGCCAAGGGA
GAGCGCCAGTCCCCTGTTGACATCGACACTCATACAGCCAAGTATGACCC
TTCCCTGAAGCCCCTGTCTGTTTCCTATGATCAAGCAACTTCCCTGAGGA
TCCTCAACAATGGTCATGCTTTCAACGTGGAGTTTGATGACTCTCAGGAC
AAAGCAGTGCTCAAGGGAGGACCCCTGGATGGCACTTACAGATTGATTCA
GTTTCACTTTCACTGGGGTTCACTTGATGGACAAGGTTCAGAGCATACTG
TGGATAAAAAGAAATATGCTGCAGAACTTCACTTGGTTCACTGGAACACC
AAATATGGGGATTTTGGGAAAGCTGTGCAGCAACCTGATGGACTGGCCGT
TCTAGGTATTTTTTTGAAGGTTGGCAGCGCTAAACCGGGCCTTCAGAAAG
TTGTTGATGTGCTGGATTCCATTAAAACAAAGGGCAAGAGTGCTGACTTC
ACTAACTTCGATCCTCGTGGCCTCCTTCCTGAATCCTTGGATTACTGGAC
CTACCCAGGCTCACTGACCACCCCTCCTCTTCTGGAATGTGTGACCTGGA
TTGTGCTCAAGGAACCCATCAGCGTCAGCAGCGAGCAGGTGTTGAAATTC
CGTAAACTTAACTTCAATGGGGAGGGTGAACCCGAAGAACTGATGGTGGA
CAACTGGCGCCCAGCTCAGCCACTGAAGAACAGGCAAATCAAAGCTTCCT
TCAAATAAGATGGTCCCATAGTCTGTATCCAAATAATGAATCTTCGGGTG
TTTCCCTTTAGCTAAGCACAGATCTACCTTGGTGATTTGGACCCTGGTTG
CTTTGTGTCTAGTTTTCTAGACCCTTCATCTCTTACTTGATAGACTTACT
AATAAAATGTGAAGACTAGACCAATTGTCATGCTTGACACAACTGCTGTG
GCTGGTTGGTGCTTTGTTTATGGTAGTAGTTTTTCTGTAACACAGAATAT
AGGATAAGAAATAAGAATAAAGTACCTTGACTTTGTTCACAGCATGTAGG
GTGATGAGCACTCACAATTGTTGACTAAAATGCTGCTTTTAAAACATAGG
AAAGTAGAATGGTTGAGTGCAAATCCATAGCACAAGATAAATTGAGCTAG
TTAAGGCAAATCAGGTAAAATAGTCATGATTCTATGTAATGTAAACCAGA
AAAAATAAATGTTCATGATTTCAAGATGTTATATTAAAGAAAAACTTTAA
AAATTATTATATATTTATAGCAAAGTTATCTTAAATATGAATTCTGTTGT
AATTTAATGACTTTTGAATTACAGAGATATAAATGAAGTATTATCTGTAA
AAATTGTTATAATTAGAGTTGTGATACAGAGTATATTTCCATTCAGACAA
TATATCATAACTTAATAAATATTGTATTTTAGATATATTCTCTAATAAAA
TTCAGAATTCTA
>Reverse complement of SEQ ID NO: 1
SEQ ID NO: 2
TAGAATTCTGAATTTTATTAGAGAATATATCTAAAATACAATATTTATTA
AGTTATGATATATTGTCTGAATGGAAATATACTCTGTATCACAACTCTAA
TTATAACAATTTTTACAGATAATACTTCATTTATATCTCTGTAATTCAAA
AGTCATTAAATTACAACAGAATTCATATTTAAGATAACTTTGCTATAAAT
ATATAATAATTTTTAAAGTTTTTCTTTAATATAACATCTTGAAATCATGA
ACATTTATTTTTTCTGGTTTACATTACATAGAATCATGACTATTTTACCT
GATTTGCCTTAACTAGCTCAATTTATCTTGTGCTATGGATTTGCACTCAA
CCATTCTACTTTCCTATGTTTTAAAAGCAGCATTTTAGTCAACAATTGTG
AGTGCTCATCACCCTACATGCTGTGAACAAAGTCAAGGTACTTTATTCTT
ATTTCTTATCCTATATTCTGTGTTACAGAAAAACTACTACCATAAACAAA
GCACCAACCAGCCACAGCAGTTGTGTCAAGCATGACAATTGGTCTAGTCT
TCACATTTTATTAGTAAGTCTATCAAGTAAGAGATGAAGGGTCTAGAAAA
CTAGACACAAAGCAACCAGGGTCCAAATCACCAAGGTAGATCTGTGCTTA
GCTAAAGGGAAACACCCGAAGATTCATTATTTGGATACAGACTATGGGAC
CATCTTATTTGAAGGAAGCTTTGATTTGCCTGTTCTTCAGTGGCTGAGCT
GGGCGCCAGTTGTCCACCATCAGTTCTTCGGGTTCACCCTCCCCATTGAA
GTTAAGTTTACGGAATTTCAACACCTGCTCGCTGCTGACGCTGATGGGTT
CCTTGAGCACAATCCAGGTCACACATTCCAGAAGAGGAGGGGTGGTCAGT
GAGCCTGGGTAGGTCCAGTAATCCAAGGATTCAGGAAGGAGGCCACGAGG
ATCGAAGTTAGTGAAGTCAGCACTCTTGCCCTTTGTTTTAATGGAATCCA
GCACATCAACAACTTTCTGAAGGCCCGGTTTAGCGCTGCCAACCTTCAAA
AAAATACCTAGAACGGCCAGTCCATCAGGTTGCTGCACAGCTTTCCCAAA
ATCCCCATATTTGGTGTTCCAGTGAACCAAGTGAAGTTCTGCAGCATATT
TCTTTTTATCCACAGTATGCTCTGAACCTTGTCCATCAAGTGAACCCCAG
TGAAAGTGAAACTGAATCAATCTGTAAGTGCCATCCAGGGGTCCTCCCTT
GAGCACTGCTTTGTCCTGAGAGTCATCAAACTCCACGTTGAAAGCATGAC
CATTGTTGAGGATCCTCAGGGAAGTTGCTTGATCATAGGAAACAGACAGG
GGCTTCAGGGAAGGGTCATACTTGGCTGTATGAGTGTCGATGTCAACAGG
GGACTGGCGCTCTCCCTTGGCAATGGGGAAGTCCTTATGCCAGTGCTCAG
GTCCGTTGTGTTTGCCGTACCCCCAGTGATGGGACATGGTCGCGCTGGCG
GTCGGGGCAGGGCAGGAATCGGCACCGATCTGGGGGGGGCGGCTTGGGCG
CCTGCACTGTGT

We claim:

1. A double stranded ribonucleic acid (dsRNA) agent for inhibiting expression of Carbonic anhydrase 2 (CA2), wherein the dsRNA agent comprises a sense strand and an antisense strand forming a double stranded region, wherein the antisense strand comprises a nucleotide sequence comprising at least 15 contiguous nucleotides, with 0, 1, 2, or 3 mismatches, from one of the antisense sequences listed in any one of Tables 3-10, and wherein the sense strand comprises a nucleotide sequence comprising at least 15 contiguous nucleotides, with 0, 1, 2, or 3 mismatches, from a sense sequence listed in any one of Tables 3-10 that corresponds to the antisense sequence and wherein the dsRNA agent comprises at least one modified nucleotide.

2. The dsRNA agent of claim 1, wherein at least one of the sense strand and the antisense strand is conjugated to one or more lipophilic moieties.

3. The dsRNA agent of claim 2, wherein the lipophilic moiety is conjugated via a linker or carrier.

4. The dsRNA agent of claim 2 or 3, wherein one or more lipophilic moieties are conjugated to one or more internal positions on at least one strand.

5. The dsRNA agent of claim 4, wherein the one or more lipophilic moieties are conjugated to one or more internal positions on at least one strand via a linker or carrier.

6. The dsRNA agent of any one of claims 2-5, wherein the lipophilic moiety is an aliphatic, alicyclic, or polyalicyclic compound.

7. The dsRNA agent of claim 6, wherein the lipophilic moiety contains a saturated or unsaturated C16 hydrocarbon chain.

8. The dsRNA agent of any one of claims 2-7, wherein the lipophilic moiety is conjugated via a carrier that replaces one or more nucleotide(s) in the internal position(s) or the double stranded region.

9. The dsRNA agent of any one of claims 2-7, wherein the lipophilic moiety is conjugated to the double-stranded iRNA agent via a linker containing an ether, thioether, urea, carbonate, amine, amide, maleimide-thioether, disulfide, phosphodiester, sulfonamide linkage, a product of a click reaction, or carbamate.

10. The double-stranded iRNA agent of any one of claims 2-8, wherein the lipophilic moiety is conjugated to a nucleobase, sugar moiety, or internucleosidic linkage.

11. The dsRNA agent of any of the preceding claims, wherein no more than five of the sense strand nucleotides and not more than five of the nucleotides of the antisense strand are unmodified nucleotides.

12. The dsRNA agent of any of the preceding claims, wherein all of the nucleotides of the sense strand and all of the nucleotides of the antisense strand comprise a modification.

13. The dsRNA agent of any of the preceding claims, wherein at least one of the modified nucleotides is selected from the group consisting of a deoxy-nucleotide, a 3′-terminal deoxythimidine (dT) nucleotide, a 2′-O-methyl modified nucleotide, a 2′-fluoro modified nucleotide, a 2′-deoxy-modified nucleotide, a locked nucleotide, an unlocked nucleotide, a conformationally restricted nucleotide, a constrained ethyl nucleotide, an abasic nucleotide, a 2′-amino-modified nucleotide, a 2′-O-allyl-modified nucleotide, 2′-C-alkyl-modified nucleotide, a 2′-methoxyethyl modified nucleotide, a 2′-O-alkyl-modified nucleotide, a morpholino nucleotide, a phosphoramidate, a non-natural base comprising nucleotide, a tetrahydropyran modified nucleotide, a 1,5-anhydrohexitol modified nucleotide, a cyclohexenyl modified nucleotide, a nucleotide comprising a phosphorothioate group, a nucleotide comprising a methylphosphonate group, a nucleotide comprising a 5′-phosphate, a nucleotide comprising a 5′-phosphate mimic, a glycol modified nucleotide, and a 2-O—(N-methylacetamide) modified nucleotide; and combinations thereof.

14. The dsRNA agent of any of the preceding claims, wherein at least one strand comprises a 3′ overhang of at least 2 nucleotides.

15. The dsRNA agent of any of the preceding claims, wherein the double stranded region is 15-30 nucleotide pairs in length.

16. The dsRNA agent of claim 15, wherein the double stranded region is 17-23 nucleotide pairs in length.

17. The dsRNA agent of any of the preceding claims, wherein each strand has 19-30 nucleotides.

18. The dsRNA agent of any of the preceding claims, wherein the agent comprises at least one phosphorothioate or methylphosphonate internucleotide linkage.

19. The dsRNA agent of any one of claims 2-18, further comprising a targeting ligand, e.g., a ligand that targets an ocular tissue.

20. The dsRNA agent of claim 19, wherein the ocular tissue is ciliary epithelium, an optic nerve, a trabecular meshwork, a juxtacanalicular tissue, a ganglion (e.g., including a retinal ganglion), episcleral veins or a Schlemm's canal (e.g., including an endothelial cell).

21. The dsRNA agent of any one of the preceding claims, further comprising a phosphate or phosphate mimic at the 5′-end of the antisense strand.

22. The dsRNA agent of claim 21, wherein the phosphate mimic is a 5′-vinyl phosphonate (VP).

23. The dsRNA of any one of claims 1-22 wherein the dsRNA agent targets a hotspot region of an mRNA encoding CA2.

24. A dsRNA agent that targets a hotspot region of a Carbonic anhydrase 2 (CA2) mRNA.

25. A cell containing the dsRNA agent of any one of claims 1-24.

26. A pharmaceutical composition for inhibiting expression of a CA2, comprising the dsRNA agent of any one of claims 1-24 and a pharmaceutically acceptable buffer.

27. A method of inhibiting expression of CA2 in a cell, the method comprising:
a. contacting the cell with the dsRNA agent of any one of claims 1-24, or a pharmaceutical composition of claim 26; and
b. maintaining the cell produced in step (a) for a time sufficient to reduce levels of CA2 mRNA, CA2 protein, or both of CA2 mRNA and protein, thereby inhibiting expression of CA2 in the cell.

28. The method of claim 27, wherein the cell is within a subject.

29. The method of claim 28, wherein the subject is a human.

30. The method of claim 29, wherein the subject has been diagnosed with a CA2-associated disorder.

31. A method of treating a subject diagnosed with a CA2-associated disorder comprising administering to the subject a therapeutically effective amount of the dsRNA agent of any one of claims 1-24 or a pharmaceutical composition of claim 26, thereby treating the disorder.

32. The method of claim 31, wherein the CA2-associated disorder is glaucoma.

33. The method of claim 31 or 32, wherein treating comprises amelioration of at least one sign or symptom of the disorder.

34. The method of any one of claims 31-33, wherein the treating comprises one or more of (a) inhibiting or reducing intraocular pressure; (b) inhibiting or reducing the expression or activity of CA2; (c) decreasing the amount of aqueous humor; (d) inhibiting or reducing optic nerve damage; (e) inhibiting or reducing retinal ganglion cell death; (f) medication to reduce intraocular pressure; (g) laser treatment; (h) surgery; (i) or trabeculectomy.

35. The method of any one of claims 24-34, wherein the dsRNA agent is administered to the subject intraocularly, intravenously, or topically.

36. The method of claim 35, wherein the intraocular administration comprises intravitreal administration (e.g., intravitreal injection), transscleral administration (e.g., transscleral injection), subconjunctival administration (e.g., subconjunctival injection), retrobulbar administration (e.g., retrobulbar injection), intracameral administration (e.g., intracameral injection), or subretinal administration (e.g., subretinal injection).

37. The method of any one of claims 24-36, further comprising administering to the subject an additional agent or therapy comprising one or more of a prostaglandin analog, a beta blocker, an alpha-adrenergic agonist, a carbonic anhydrase inhibitor, or an anti-CA2 agent suitable for treatment or prevention of a CA2-associated disorder.

The application's sequence listing, which the Patent Office published only in electronic form, follows.

SEQUENCE LISTING (4293 sequences)

SEQ ID NO: 1 - DNA, 1562 bp, Homo sapiens
acacagtgcaggcgcccaagccgccgccgccagatcggtgccgattcctgccctgccccgaccgccagcgcgaccatgtcccatcactgggggtacggcaaacacaacggacctgagcactggcataaggacttccccattgccaagggagagcgccagtcccctgttgacatcgacactcatacagccaagtatgacccttccctgaagcccctgtctgtttcctatgatcaagcaacttccctgaggatcctcaacaatggtcatgctttcaacgtggagtttgatgactctcaggacaaagcagtgctcaagggaggacccctggatggcacttacagattgattcagtttcactttcactggggttcacttgatggacaaggttcagagcatactgtggataaaaagaaatatgctgcagaacttcacttggttcactggaacaccaaatatggggattttgggaaagctgtgcagcaacctgatggactggccgttctaggtatttttttgaaggttggcagcgctaaaccgggccttcagaaagttgttgatgtgctggattccattaaaacaaagggcaagagtgctgacttcactaacttcgatcctcgtggcctccttcctgaatccttggattactggacctacccaggctcactgaccacccctcctcttctggaatgtgtgacctggattgtgctcaaggaacccatcagcgtcagcagcgagcaggtgttgaaattccgtaaacttaacttcaatggggagggtgaacccgaagaactgatggtggacaactggcgcccagctcagccactgaagaacaggcaaatcaaagcttccttcaaataagatggtcccatagtctgtatccaaataatgaatcttcgggtgtttccctttagctaagcacagatctaccttggtgatttggaccctggttgctttgtgtctagttttctagacccttcatctcttacttgatagacttactaataaaatgtgaagactagaccaattgtcatgcttgacacaactgctgtggctggttggtgctttgtttatggtagtagtttttctgtaacacagaatataggataagaaataagaataaagtaccttgactttgttcacagcatgtagggtgatgagcactcacaattgttgactaaaatgctgcttttaaaacataggaaagtagaatggttgagtgcaaatccatagcacaagataaattgagctagttaaggcaaatcaggtaaaatagtcatgattctatgtaatgtaaaccagaaaaaataaatgttcatgatttcaagatgttatattaaagaaaaactttaaaaattattatatatttatagcaaagttatcttaaatatgaattctgttgtaatttaatgacttttgaattacagagatataaatgaagtattatctgtaaaaattgttataattagagttgtgatacagagtatatttccattcagacaatatatcataacttaataaatattgtattttagatatattctctaataaaattcagaattcta

SEQ ID NO: 2 - DNA, 1562 bp, Homo sapiens
tagaattctgaattttattagagaatatatctaaaatacaatatttattaagttatgatatattgtctgaatggaaatatactctgtatcacaactctaattataacaatttttacagataatacttcatttatatctctgtaattcaaaagtcattaaattacaacagaattcatatttaagataactttgctataaatatataataatttttaaagtttttctttaatataacatcttgaaatcatgaacatttattttttctggtttacattacatagaatcatgactattttacctgatttgccttaactagctcaatttatcttgtgctatggatttgcactcaaccattctactttcctatgttttaaaagcagcattttagtcaacaattgtgagtgctcatcaccctacatgctgtgaacaaagtcaaggtactttattcttatttcttatcctatattctgtgttacagaaaaactactaccataaacaaagcaccaaccagccacagcagttgtgtcaagcatgacaattggtctagtcttcacattttattagtaagtctatcaagtaagagatgaagggtctagaaaactagacacaaagcaaccagggtccaaatcaccaaggtagatctgtgcttagctaaagggaaacacccgaagattcattatttggatacagactatgggaccatcttatttgaaggaagctttgatttgcctgttcttcagtggctgagctgggcgccagttgtccaccatcagttcttcgggttcaccctccccattgaagttaagtttacggaatttcaacacctgctcgctgctgacgctgatgggttccttgagcacaatccaggtcacacattccagaagaggaggggtggtcagtgagcctgggtaggtccagtaatccaaggattcaggaaggaggccacgaggatcgaagttagtgaagtcagcactcttgccctttgttttaatggaatccagcacatcaacaactttctgaaggcccggtttagcgctgccaaccttcaaaaaaatacctagaacggccagtccatcaggttgctgcacagctttcccaaaatccccatatttggtgttccagtgaaccaagtgaagttctgcagcatatttctttttatccacagtatgctctgaaccttgtccatcaagtgaaccccagtgaaagtgaaactgaatcaatctgtaagtgccatccaggggtcctcccttgagcactgctttgtcctgagagtcatcaaactccacgttgaaagcatgaccattgttgaggatcctcagggaagttgcttgatcataggaaacagacaggggcttcagggaagggtcatacttggctgtatgagtgtcgatgtcaacaggggactggcgctctcccttggcaatggggaagtccttatgccagtgctcaggtccgttgtgtttgccgtacccccagtgatgggacatggtcgcgctggcggtcggggcagggcaggaatcggcaccgatctggcggcggcggcttgggcgcctgcactgtgt

SEQ ID NO: 3 - protein, 16 aa, Unknown
  Description of Unknown: RFGF peptide sequence
AAVALLPAVLLALLAP

SEQ ID NO: 4 - protein, 11 aa, Unknown
  Description of Unknown: RFGF analogue sequence
AALLPVLLAAP

SEQ ID NO: 5 - protein, 13 aa, Human immunodeficiency virus 1
GRKKRRQRRRPPQ

SEQ ID NO: 6 - protein, 16 aa, Drosophila sp.
RQIKIWFQNRRMKWKK

SEQ ID NO: 7 - RNA, 21 nt, Artificial Sequence
  Description of Artificial Sequence: Synthetic oligonucleotide
agaucggugccgauuccugca

SEQ ID NO: 8 - RNA, 21 nt, Artificial Sequence
  Description of Artificial Sequence: Synthetic oligonucleotide
cgcgaccaugucccaucacua

SEQ ID NO: 9 - RNA, 21 nt, Artificial Sequence
  Description of Artificial Sequence: Synthetic oligonucleotide
guacggcaaacacaacggaca

SEQ ID NO: 10 - RNA, 21 nt, Artificial Sequence
  Description of Artificial Sequence: Synthetic oligonucleotide
caaacacaacggaccugagca

SEQ ID NO: 11 - RNA, 21 nt, Artificial Sequence
  Description of Artificial Sequence: Synthetic oligonucleotide
ggaccugagcacuggcauaaa

SEQ ID NO: 12 - RNA, 21 nt, Artificial Sequence
  Description of Artificial Sequence: Synthetic oligonucleotide
gagcacuggcauaaggacuua

SEQ ID NO: 13 - RNA, 21 nt, Artificial Sequence
  Description of Artificial Sequence: Synthetic oligonucleotide
guugacaucgacacucauaca

SEQ ID NO: 14 - RNA, 21 nt, Artificial Sequence
  Description of Artificial Sequence: Synthetic oligonucleotide
acacucauacagccaaguaua

SEQ ID NO: 15 - RNA, 21 nt, Artificial Sequence
  Description of Artificial Sequence: Synthetic oligonucleotide
uacagccaaguaugacccuua

SEQ ID NO: 16 - RNA, 21 nt, Artificial Sequence
  Description of Artificial Sequence: Synthetic oligonucleotide
caaguaugacccuucccugaa

SEQ ID NO: 17 - RNA, 21 nt, Artificial Sequence
  Description of Artificial Sequence: Synthetic oligonucleotide
ugucuguuuccuaugaucaaa

SEQ ID NO: 18 - RNA, 21 nt, Artificial Sequence
  Description of Artificial Sequence: Synthetic oligonucleotide
ccuaugaucaagcaacuucca

SEQ ID NO: 19 - RNA, 21 nt, Artificial Sequence
  Description of Artificial Sequence: Synthetic oligonucleotide
caagcaacuucccugaggaua

SEQ ID NO: 20 - RNA, 21 nt, Artificial Sequence
  Description of Artificial Sequence: Synthetic oligonucleotide
cccugaggauccucaacaaua

SEQ ID NO: 21 - RNA, 21 nt, Artificial Sequence
  Description of Artificial Sequence: Synthetic oligonucleotide
uccucaacaauggucaugcua

SEQ ID NO: 22 - RNA, 21 nt, Artificial Sequence
  Description of Artificial Sequence: Synthetic oligonucleotide
acaauggucaugcuuucaaca

SEQ ID NO: 23 - RNA, 21 nt, Artificial Sequence
  Description of Artificial Sequence: Synthetic oligonucleotide
augcuuucaacguggaguuua

SEQ ID NO: 24 - RNA, 21 nt, Artificial Sequence
  Description of Artificial Sequence: Synthetic oligonucleotide
aacguggaguuugaugacuca

SEQ ID NO: 25 - RNA, 21 nt, Artificial Sequence
  Description of Artificial Sequence: Synthetic oligonucleotide
ugaugacucucaggacaaaga

SEQ ID NO: 26 - RNA, 21 nt, Artificial Sequence
  Description of Artificial Sequence: Synthetic oligonucleotide
ucucaggacaaagcagugcua

SEQ ID NO: 27 - RNA, 21 nt, Artificial Sequence
  Description of Artificial Sequence: Synthetic oligonucleotide
gacaaagcagugcucaaggga

SEQ ID NO: 28 - RNA, 21 nt, Artificial Sequence
  Description of Artificial Sequence: Synthetic oligonucleotide
uggcacuuacagauugauuca

SEQ ID NO: 29 - RNA, 21 nt, Artificial Sequence
  Description of Artificial Sequence: Synthetic oligonucleotide
uuacagauugauucaguuuca

SEQ ID NO: 30 - RNA, 21 nt, Artificial Sequence
  Description of Artificial Sequence: Synthetic oligonucleotide
auucaguuucacuuucacuga

SEQ ID NO: 31 - RNA, 21 nt, Artificial Sequence
  Description of Artificial Sequence: Synthetic oligonucleotide
ucacuugauggacaagguuca

SEQ ID NO: 32 - RNA, 21 nt, Artificial Sequence
  Description of Artificial Sequence: Synthetic oligonucleotide
gauggacaagguucagagcaa

SEQ ID NO: 33 - RNA, 21 nt, Artificial Sequence
  Description of Artificial Sequence: Synthetic oligonucleotide
caagguucagagcauacugua

SEQ ID NO: 34 - RNA, 21 nt, Artificial Sequence
  Description of Artificial Sequence: Synthetic oligonucleotide
ucagagcauacuguggauaaa

SEQ ID NO: 35 - RNA, 21 nt, Artificial Sequence
  Description of Artificial Sequence: Synthetic oligonucleotide
aagaaauaugcugcagaacua

SEQ ID NO: 36 - RNA, 21 nt, Artificial Sequence
  Description of Artificial Sequence: Synthetic oligonucleotide
uaugcugcagaacuucacuua

SEQ ID NO: 37 - RNA, 21 nt, Artificial Sequence
  Description of Artificial Sequence: Synthetic oligonucleotide
gcagaacuucacuugguucaa

SEQ ID NO: 38 - RNA, 21 nt, Artificial Sequence
  Description of Artificial Sequence: Synthetic oligonucleotide
cuucacuugguucacuggaaa

SEQ ID NO: 39 - RNA, 21 nt, Artificial Sequence
  Description of Artificial Sequence: Synthetic oligonucleotide
uuugggaaagcugugcagcaa

SEQ ID NO: 40 - RNA, 21 nt, Artificial Sequence
  Description of Artificial Sequence: Synthetic oligonucleotide
gugcagcaaccugauggacua

SEQ ID NO: 41 - RNA, 21 nt, Artificial Sequence
  Description of Artificial Sequence: Synthetic oligonucleotide
caaccugauggacuggccgua

SEQ ID NO: 42 - RNA, 21 nt, Artificial Sequence
  Description of Artificial Sequence: Synthetic oligonucleotide
cuggccguucuagguauuuua

SEQ ID NO: 43 - RNA, 21 nt, Artificial Sequence
  Description of Artificial Sequence: Synthetic oligonucleotide
ugaagguuggcagcgcuaaaa

SEQ ID NO: 44 - RNA, 21 nt, Artificial Sequence
  Description of Artificial Sequence: Synthetic oligonucleotide
gcagcgcuaaaccgggccuua

SEQ ID NO: 45 - RNA, 21 nt, Artificial Sequence
  Description of Artificial Sequence: Synthetic oligonucleotide
ccgggccuucagaaaguugua

SEQ ID NO: 46 - RNA, 21 nt, Artificial Sequence
  Description of Artificial Sequence: Synthetic oligonucleotide
cuucagaaaguuguugaugua

SEQ ID NO: 47 - RNA, 21 nt, Artificial Sequence
  Description of Artificial Sequence: Synthetic oligonucleotide
guuguugaugugcuggauuca

SEQ ID NO: 48 - RNA, 21 nt, Artificial Sequence
  Description of Artificial Sequence: Synthetic oligonucleotide
gcuggauuccauuaaaacaaa

SEQ ID NO: 49 - RNA, 21 nt, Artificial Sequence
  Description of Artificial Sequence: Synthetic oligonucleotide
uccauuaaaacaaagggcaaa

SEQ ID NO: 50 - RNA, 21 nt, Artificial Sequence
  Description of Artificial Sequence: Synthetic oligonucleotide
aaaacaaagggcaagagugca

SEQ ID NO: 51 - RNA, 21 nt, Artificial Sequence
  Description of Artificial Sequence: Synthetic oligonucleotide
ggcaagagugcugacuucaca

SEQ ID NO: 52 - RNA, 21 nt, Artificial Sequence
  Description of Artificial Sequence: Synthetic oligonucleotide
gugcugacuucacuaacuuca

SEQ ID NO: 53 - RNA, 21 nt, Artificial Sequence
  Description of Artificial Sequence: Synthetic oligonucleotide
acuucacuaacuucgauccua

SEQ ID NO: 54 - RNA, 21 nt, Artificial Sequence
  Description of Artificial Sequence: Synthetic oligonucleotide
cgauccucguggccuccuuca

SEQ ID NO: 55 - RNA, 21 nt, Artificial Sequence
  Description of Artificial Sequence: Synthetic oligonucleotide
ucguggccuccuuccugaaua

SEQ ID NO: 56 - RNA, 21 nt, Artificial Sequence
  Description of Artificial Sequence: Synthetic oligonucleotide
ccuccuuccugaauccuugga

SEQ ID NO: 57 - RNA, 21 nt, Artificial Sequence
  Description of Artificial Sequence: Synthetic oligonucleotide
ccugaauccuuggauuacuga

SEQ ID NO: 58 - RNA, 21 nt, Artificial Sequence
  Description of Artificial Sequence: Synthetic oligonucleotide
uccuuggauuacuggaccuaa

SEQ ID NO: 59 - RNA, 21 nt, Artificial Sequence
  Description of Artificial Sequence: Synthetic oligonucleotide
ccuacccaggcucacugacca

SEQ ID NO: 60 - RNA, 21 nt, Artificial Sequence
  Description of Artificial Sequence: Synthetic oligonucleotide
ccucuucuggaaugugugaca

SEQ ID NO: 61 - RNA, 21 nt, Artificial Sequence
  Description of Artificial Sequence: Synthetic oligonucleotide
uggaaugugugaccuggauua

SEQ ID NO: 62 - RNA, 21 nt, Artificial Sequence
  Description of Artificial Sequence: Synthetic oligonucleotide
ugugaccuggauugugcucaa

SEQ ID NO: 63 - RNA, 21 nt, Artificial Sequence
  Description of Artificial Sequence: Synthetic oligonucleotide
cuggauugugcucaaggaaca

SEQ ID NO: 64 - RNA, 21 nt, Artificial Sequence
  Description of Artificial Sequence: Synthetic oligonucleotide
cucaaggaacccaucagcgua

SEQ ID NO: 65 - RNA, 21 nt, Artificial Sequence
  Description of Artificial Sequence: Synthetic oligonucleotide
gaacccaucagcgucagcaga

SEQ ID NO: 66 - RNA, 21 nt, Artificial Sequence
  Description of Artificial Sequence: Synthetic oligonucleotide
agaacugaugguggacaacua

SEQ ID NO: 67 - RNA, 21 nt, Artificial Sequence
  Description of Artificial Sequence: Synthetic oligonucleotide
cgagcagguguugaaauucca

SEQ ID NO: 68 - RNA, 21 nt, Artificial Sequence
  Description of Artificial Sequence: Synthetic oligonucleotide
gguguugaaauuccguaaaca

SEQ ID NO: 69 - RNA, 21 nt, Artificial Sequence
  Description of Artificial Sequence: Synthetic oligonucleotide
gaaauuccguaaacuuaacua

SEQ ID NO: 70 - RNA, 21 nt, Artificial Sequence
  Description of Artificial Sequence: Synthetic oligonucleotide
ccguaaacuuaacuucaauga

SEQ ID NO: 71 - RNA, 21 nt, Artificial Sequence
  Description of Artificial Sequence: Synthetic oligonucleotide
gagggugaacccgaagaacua

SEQ ID NO: 72 - RNA, 21 nt, Artificial Sequence
  Description of Artificial Sequence: Synthetic oligonucleotide
gaacccgaagaacugauggua

SEQ ID NO: 73 - RNA, 21 nt, Artificial Sequence
  Description of Artificial Sequence: Synthetic oligonucleotide
augguggacaacuggcgccca

SEQ ID NO: 74 - RNA, 21 nt, Artificial Sequence
  Description of Artificial Sequence: Synthetic oligonucleotide
ccagcucagccacugaagaaa

SEQ ID NO: 75 - RNA, 21 nt, Artificial Sequence
  Description of Artificial Sequence: Synthetic oligonucleotide
cagccacugaagaacaggcaa

SEQ ID NO: 76 - RNA, 21 nt, Artificial Sequence
  Description of Artificial Sequence: Synthetic oligonucleotide
cugaagaacaggcaaaucaaa

SEQ ID NO: 77 - RNA, 21 nt, Artificial Sequence
  Description of Artificial Sequence: Synthetic oligonucleotide
ucacuggaacaccaaauauga

SEQ ID NO: 78 - RNA, 21 nt, Artificial Sequence
  Description of Artificial Sequence: Synthetic oligonucleotide
ggcaaaucaaagcuuccuuca

SEQ ID NO: 79 - RNA, 21 nt, Artificial Sequence
  Description of Artificial Sequence: Synthetic oligonucleotide
caaagcuuccuucaaauaaga

SEQ ID NO: 80 - RNA, 21 nt, Artificial Sequence
  Description of Artificial Sequence: Synthetic oligonucleotide
uuccuucaaauaagaugguca

SEQ ID NO: 81 - RNA, 21 nt, Artificial Sequence
  Description of Artificial Sequence: Synthetic oligonucleotide
auaagauggucccauagucua

SEQ ID NO: 82 - RNA, 21 nt, Artificial Sequence
  Description of Artificial Sequence: Synthetic oligonucleotide
uggucccauagucuguaucca

SEQ ID NO: 83 - RNA, 21 nt, Artificial Sequence
  Description of Artificial Sequence: Synthetic oligonucleotide
auagucuguauccaaauaaua

SEQ ID NO: 84 - RNA, 21 nt, Artificial Sequence
  Description of Artificial Sequence: Synthetic oligonucleotide
guauccaaauaaugaaucuua

SEQ ID NO: 85 - RNA, 21 nt, Artificial Sequence
  Description of Artificial Sequence: Synthetic oligonucleotide
auaaugaaucuucggguguua

SEQ ID NO: 86 - RNA, 21 nt, Artificial Sequence
  Description of Artificial Sequence: Synthetic oligonucleotide
aucuucggguguuucccuuua

SEQ ID NO: 87 - RNA, 21 nt, Artificial Sequence
  Description of Artificial Sequence: Synthetic oligonucleotide
ggguguuucccuuuagcuaaa

SEQ ID NO: 88 - RNA, 21 nt, Artificial Sequence
  Description of Artificial Sequence: Synthetic oligonucleotide
cccuuuagcuaagcacagaua

SEQ ID NO: 89 - RNA, 21 nt, Artificial Sequence
  Description of Artificial Sequence: Synthetic oligonucleotide
agcuaagcacagaucuaccua

SEQ ID NO: 90 - RNA, 21 nt, Artificial Sequence
  Description of Artificial Sequence: Synthetic oligonucleotide
cagaucuaccuuggugauuua

SEQ ID NO: 91 - RNA, 21 nt, Artificial Sequence
  Description of Artificial Sequence: Synthetic oligonucleotide
accuuggugauuuggacccua

SEQ ID NO: 92 - RNA, 21 nt, Artificial Sequence
  Description of Artificial Sequence: Synthetic oligonucleotide
uuggacccugguugcuuugua

SEQ ID NO: 93 - RNA, 21 nt, Artificial Sequence
  Description of Artificial Sequence: Synthetic oligonucleotide
cugguugcuuugugucuagua

SEQ ID NO: 94 - RNA, 21 nt, Artificial Sequence
  Description of Artificial Sequence: Synthetic oligonucleotide
gcuuugugucuaguuuucuaa

SEQ ID NO: 95 - RNA, 21 nt, Artificial Sequence
  Description of Artificial Sequence: Synthetic oligonucleotide
cuaguuuucuagacccuucaa

SEQ ID NO: 96 - RNA, 21 nt, Artificial Sequence
  Description of Artificial Sequence: Synthetic oligonucleotide
uucuagacccuucaucucuua

SEQ ID NO: 97 - RNA, 21 nt, Artificial Sequence
  Description of Artificial Sequence: Synthetic oligonucleotide
acccuucaucucuuacuugaa

SEQ ID NO: 98 - RNA, 21 nt, Artificial Sequence
  Description of Artificial Sequence: Synthetic oligonucleotide
aucucuuacuugauagacuua

SEQ ID NO: 99 - RNA, 21 nt, Artificial Sequence
  Description of Artificial Sequence: Synthetic oligonucleotide
uacuugauagacuuacuaaua

SEQ ID NO: 100 - RNA, 21 nt, Artificial Sequence
  Description of Artificial Sequence: Synthetic oligonucleotide
cuuacuaauaaaaugugaaga

SEQ ID NO: 101 - RNA, 21 nt, Artificial Sequence
  Description of Artificial Sequence: Synthetic oligonucleotide
aaaaugugaagacuagaccaa

SEQ ID NO: 102 - RNA, 21 nt, Artificial Sequence
  Description of Artificial Sequence: Synthetic oligonucleotide
ugaagacuagaccaauuguca

SEQ ID NO: 103 - RNA, 21 nt, Artificial Sequence
  Description of Artificial Sequence: Synthetic oligonucleotide
uagaccaauugucaugcuuga

SEQ ID NO: 104 - RNA, 21 nt, Artificial Sequence
  Description of Artificial Sequence: Synthetic oligonucleotide
ucaugcuugacacaacugcua

SEQ ID NO: 105 - RNA, 21 nt, Artificial Sequence
  Description of Artificial Sequence: Synthetic oligonucleotide
uugacacaacugcuguggcua

SEQ ID NO: 106 - RNA, 21 nt, Artificial Sequence
  Description of Artificial Sequence: Synthetic oligonucleotide
cuguggcugguuggugcuuua

SEQ ID NO: 107 - RNA, 21 nt, Artificial Sequence
  Description of Artificial Sequence: Synthetic oligonucleotide
cugguuggugcuuuguuuaua

SEQ ID NO: 108 - RNA, 21 nt, Artificial Sequence
  Description of Artificial Sequence: Synthetic oligonucleotide
ggugcuuuguuuaugguagua

SEQ ID NO: 109 - RNA, 21 nt, Artificial Sequence
  Description of Artificial Sequence: Synthetic oligonucleotide
uuguuuaugguaguaguuuua

SEQ ID NO: 110 - RNA, 21 nt, Artificial Sequence
  Description of Artificial Sequence: Synthetic oligonucleotide
ugguaguaguuuuucuguaaa

SEQ ID NO: 111 - RNA, 21 nt, Artificial Sequence
  Description of Artificial Sequence: Synthetic oligonucleotide
uaguuuuucuguaacacagaa

SEQ ID NO: 112 - RNA, 21 nt, Artificial Sequence
  Description of Artificial Sequence: Synthetic oligonucleotide
uucuguaacacagaauauaga

SEQ ID NO: 113 - RNA, 21 nt, Artificial Sequence
  Description of Artificial Sequence: Synthetic oligonucleotide
cacagaauauaggauaagaaa

SEQ ID NO: 114 - RNA, 21 nt, Artificial Sequence
  Description of Artificial Sequence: Synthetic oligonucleotide
agaauaaaguaccuugacuua

SEQ ID NO: 115 - RNA, 21 nt, Artificial Sequence
  Description of Artificial Sequence: Synthetic oligonucleotide
cuugacuuuguucacagcaua

SEQ ID NO: 116 - RNA, 21 nt, Artificial Sequence
  Description of Artificial Sequence: Synthetic oligonucleotide
uuuguucacagcauguaggga

SEQ ID NO: 117 - RNA, 21 nt, Artificial Sequence
  Description of Artificial Sequence: Synthetic oligonucleotide
cacagcauguagggugaugaa

SEQ ID NO: 118 - RNA, 21 nt, Artificial Sequence
  Description of Artificial Sequence: Synthetic oligonucleotide
uagggugaugagcacucacaa

SEQ ID NO: 119 - RNA, 21 nt, Artificial Sequence
  Description of Artificial Sequence: Synthetic oligonucleotide
gaugagcacucacaauuguua

SEQ ID NO: 120 - RNA, 21 nt, Artificial Sequence
  Description of Artificial Sequence: Synthetic oligonucleotide
acucacaauuguugacuaaaa

SEQ ID NO: 121 - RNA, 21 nt, Artificial Sequence
  Description of Artificial Sequence: Synthetic oligonucleotide
uugacuaaaaugcugcuuuua

SEQ ID NO: 122 - RNA, 21 nt, Artificial Sequence
  Description of Artificial Sequence: Synthetic oligonucleotide
augcugcuuuuaaaacauaga

SEQ ID NO: 123 - RNA, 21 nt, Artificial Sequence
  Description of Artificial Sequence: Synthetic oligonucleotide
cuuuuaaaacauaggaaagua

SEQ ID NO: 124 - RNA, 21 nt, Artificial Sequence
  Description of Artificial Sequence: Synthetic oligonucleotide
cauaggaaaguagaaugguua

SEQ ID NO: 125 - RNA, 21 nt, Artificial Sequence
  Description of Artificial Sequence: Synthetic oligonucleotide
aguagaaugguugagugcaaa

SEQ ID NO: 126 - RNA, 21 nt, Artificial Sequence
  Description of Artificial Sequence: Synthetic oligonucleotide
augguugagugcaaauccaua

SEQ ID NO: 127 - RNA, 21 nt, Artificial Sequence
  Description of Artificial Sequence: Synthetic oligonucleotide
agugcaaauccauagcacaaa

SEQ ID NO: 128 - RNA, 21 nt, Artificial Sequence
  Description of Artificial Sequence: Synthetic oligonucleotide
uccauagcacaagauaaauua

SEQ ID NO: 129 - RNA, 21 nt, Artificial Sequence
  Description of Artificial Sequence: Synthetic oligonucleotide
caagauaaauugagcuaguua

SEQ ID NO: 130 - RNA, 21 nt, Artificial Sequence
  Description of Artificial Sequence: Synthetic oligonucleotide
gagcuaguuaaggcaaaucaa

SEQ ID NO: 131 - RNA, 21 nt, Artificial Sequence
  Description of Artificial Sequence: Synthetic oligonucleotide
uaaggcaaaucagguaaaaua

SEQ ID NO: 132 - RNA, 21 nt, Artificial Sequence
  Description of Artificial Sequence: Synthetic oligonucleotide
agguaaaauagucaugauuca

SEQ ID NO: 133 - RNA, 21 nt, Artificial Sequence
  Description of Artificial Sequence: Synthetic oligonucleotide
gucaugauucuauguaaugua

SEQ ID NO: 134 - RNA, 21 nt, Artificial Sequence
  Description of Artificial Sequence: Synthetic oligonucleotide
uauguaauguaaaccagaaaa

SEQ ID NO: 135 - RNA, 21 nt, Artificial Sequence
  Description of Artificial Sequence: Synthetic oligonucleotide
ucaugauuucaagauguuaua

SEQ ID NO: 136 - RNA, 21 nt, Artificial Sequence
  Description of Artificial Sequence: Synthetic oligonucleotide
cuuuugaauuacagagauaua

SEQ ID NO: 137 - RNA, 21 nt, Artificial Sequence
  Description of Artificial Sequence: Synthetic oligonucleotide
uuagaguugugauacagagua

SEQ ID NO: 138 - RNA, 21 nt, Artificial Sequence
  Description of Artificial Sequence: Synthetic oligonucleotide
uacagaguauauuuccauuca

SEQ ID NO: 139 - RNA, 21 nt, Artificial Sequence
  Description of Artificial Sequence: Synthetic oligonucleotide
auauuuccauucagacaauaa

SEQ ID NO: 140 - RNA, 21 nt, Artificial Sequence
  Description of Artificial Sequence: Synthetic oligonucleotide
uucagacaauauaucauaaca

SEQ ID NO: 141 - RNA, 21 nt, Artificial Sequence
  Description of Artificial Sequence: Synthetic oligonucleotide
uugugauacagaguauauuua

SEQ ID NO: 142 - RNA, 23 nt, Artificial Sequence
  Description of Artificial Sequence: Synthetic oligonucleotide
ugcaggaaucggcaccgaucugg

SEQ ID NO: 143 - RNA, 23 nt, Artificial Sequence
  Description of Artificial Sequence: Synthetic oligonucleotide
uagugaugggacauggucgcgcu

SEQ ID NO: 144 - RNA, 23 nt, Artificial Sequence
  Description of Artificial Sequence: Synthetic oligonucleotide
uguccguuguguuugccguaccc

SEQ ID NO: 145 - RNA, 23 nt, Artificial Sequence
  Description of Artificial Sequence: Synthetic oligonucleotide
ugcucagguccguuguguuugcc

SEQ ID NO: 146 - RNA, 23 nt, Artificial Sequence
  Description of Artificial Sequence: Synthetic oligonucleotide
uuuaugccagugcucagguccgu

SEQ ID NO: 147 - RNA, 23 nt, Artificial Sequence
  Description of Artificial Sequence: Synthetic oligonucleotide
uaaguccuuaugccagugcucag

SEQ ID NO: 148 - RNA, 23 nt, Artificial Sequence
  Description of Artificial Sequence: Synthetic oligonucleotide
uguaugagugucgaugucaacag

SEQ ID NO: 149 - RNA, 23 nt, Artificial Sequence
  Description of Artificial Sequence: Synthetic oligonucleotide
uauacuuggcuguaugagugucg

SEQ ID NO: 150 - RNA, 23 nt, Artificial Sequence
  Description of Artificial Sequence: Synthetic oligonucleotide
uaagggucauacuuggcuguaug

SEQ ID NO: 151 - RNA, 23 nt, Artificial Sequence
  Description of Artificial Sequence: Synthetic oligonucleotide
uucagggaagggucauacuuggc

SEQ ID NO: 152 - RNA, 23 nt, Artificial Sequence
  Description of Artificial Sequence: Synthetic oligonucleotide
uuugaucauaggaaacagacagg

SEQ ID NO: 153 - RNA, 23 nt, Artificial Sequence
  Description of Artificial Sequence: Synthetic oligonucleotide
uggaaguugcuugaucauaggaa

SEQ ID NO: 154 - RNA, 23 nt, Artificial Sequence
  Description of Artificial Sequence: Synthetic oligonucleotide
uauccucagggaaguugcuugau

SEQ ID NO: 155 - RNA, 23 nt, Artificial Sequence
  Description of Artificial Sequence: Synthetic oligonucleotide
uauuguugaggauccucagggaa

SEQ ID NO: 156 - RNA, 23 nt, Artificial Sequence
  Description of Artificial Sequence: Synthetic oligonucleotide
uagcaugaccauuguugaggauc

SEQ ID NO: 157 - RNA, 23 nt, Artificial Sequence
  Description of Artificial Sequence: Synthetic oligonucleotide
uguugaaagcaugaccauuguug

SEQ ID NO: 158 - RNA, 23 nt, Artificial Sequence
  Description of Artificial Sequence: Synthetic oligonucleotide
uaaacuccacguugaaagcauga

SEQ ID NO: 159 - RNA, 23 nt, Artificial Sequence
  Description of Artificial Sequence: Synthetic oligonucleotide
ugagucaucaaacuccacguuga

SEQ ID NO: 160 - RNA, 23 nt, Artificial Sequence
  Description of Artificial Sequence: Synthetic oligonucleotide
ucuuuguccugagagucaucaaa

SEQ ID NO: 161 - RNA, 23 nt, Artificial Sequence
  Description of Artificial Sequence: Synthetic oligonucleotide
uagcacugcuuuguccugagagu

SEQ ID NO: 162 - RNA, 23 nt, Artificial Sequence
  Description of Artificial Sequence: Synthetic oligonucleotide
ucccuugagcacugcuuuguccu

SEQ ID NO: 163 - RNA, 23 nt, Artificial Sequence
  Description of Artificial Sequence: Synthetic oligonucleotide
ugaaucaaucuguaagugccauc

SEQ ID NO: 164 - RNA, 23 nt, Artificial Sequence
  Description of Artificial Sequence: Synthetic oligonucleotide
ugaaacugaaucaaucuguaagu

SEQ ID NO: 165 - RNA, 23 nt, Artificial Sequence
  Description of Artificial Sequence: Synthetic oligonucleotide
ucagugaaagugaaacugaauca

SEQ ID NO: 166 - RNA, 23 nt, Artificial Sequence
  Description of Artificial Sequence: Synthetic oligonucleotide
ugaaccuuguccaucaagugaac

SEQ ID NO: 167 - RNA, 23 nt, Artificial Sequence
  Description of Artificial Sequence: Synthetic oligonucleotide
uugcucugaaccuuguccaucaa

SEQ ID NO: 168 - RNA, 23 nt, Artificial Sequence
  Description of Artificial Sequence: Synthetic oligonucleotide
uacaguaugcucugaaccuuguc

SEQ ID NO: 169 - RNA, 23 nt, Artificial Sequence
  Description of Artificial Sequence: Synthetic oligonucleotide
uuuauccacaguaugcucugaac

SEQ ID NO: 170 - RNA, 23 nt, Artificial Sequence
  Description of Artificial Sequence: Synthetic oligonucleotide
uaguucugcagcauauuucuuuu

SEQ ID NO: 171 - RNA, 23 nt, Artificial Sequence
  Description of Artificial Sequence: Synthetic oligonucleotide
uaagugaaguucugcagcauauu

SEQ ID NO: 172 - RNA, 23 nt, Artificial Sequence
  Description of Artificial Sequence: Synthetic oligonucleotide
uugaaccaagugaaguucugcag

SEQ ID NO: 173 - RNA, 23 nt, Artificial Sequence
  Description of Artificial Sequence: Synthetic oligonucleotide
uuuccagugaaccaagugaaguu

SEQ ID NO: 174 - RNA, 23 nt, Artificial Sequence
  Description of Artificial Sequence: Synthetic oligonucleotide
uugcugcacagcuuucccaaaau

SEQ ID NO: 175 - RNA, 23 nt, Artificial Sequence
  Description of Artificial Sequence: Synthetic oligonucleotide
uaguccaucagguugcugcacag

SEQ ID NO: 176 - RNA, 23 nt, Artificial Sequence
  Description of Artificial Sequence: Synthetic oligonucleotide
uacggccaguccaucagguugcu

SEQ ID NO: 177 - RNA, 23 nt, Artificial Sequence
  Description of Artificial Sequence: Synthetic oligonucleotide
uaaaauaccuagaacggccaguc

SEQ ID NO: 178 - RNA, 23 nt, Artificial Sequence
  Description of Artificial Sequence: Synthetic oligonucleotide
uuuuagcgcugccaaccuucaaa

SEQ ID NO: 179 - RNA, 23 nt, Artificial Sequence
  Description of Artificial Sequence: Synthetic oligonucleotide
uaaggcccgguuuagcgcugcca

SEQ ID NO: 180 - RNA, 23 nt, Artificial Sequence
  Description of Artificial Sequence: Synthetic oligonucleotide
uacaacuuucugaaggcccgguu

SEQ ID NO: 181 - RNA, 23 nt, Artificial Sequence
  Description of Artificial Sequence: Synthetic oligonucleotide
uacaucaacaacuuucugaaggc

SEQ ID NO: 182 - RNA, 23 nt, Artificial Sequence
  Description of Artificial Sequence: Synthetic oligonucleotide
ugaauccagcacaucaacaacuu

SEQ ID NO: 183 - RNA, 23 nt, Artificial Sequence
  Description of Artificial Sequence: Synthetic oligonucleotide
uuuguuuuaauggaauccagcac

SEQ ID NO: 184 - RNA, 23 nt, Artificial Sequence
  Description of Artificial Sequence: Synthetic oligonucleotide
uuugcccuuuguuuuaauggaau

SEQ ID NO: 185 - RNA, 23 nt, Artificial Sequence
  Description of Artificial Sequence: Synthetic oligonucleotide
ugcacucuugcccuuuguuuuaa

SEQ ID NO: 186 - RNA, 23 nt, Artificial Sequence
  Description of Artificial Sequence: Synthetic oligonucleotide
ugugaagucagcacucuugcccu

SEQ ID NO: 187 - RNA, 23 nt, Artificial Sequence
  Description of Artificial Sequence: Synthetic oligonucleotide
ugaaguuagugaagucagcacuc

SEQ ID NO: 188 - RNA, 23 nt, Artificial Sequence
  Description of Artificial Sequence: Synthetic oligonucleotide
uaggaucgaaguuagugaaguca

SEQ ID NO: 189 - RNA, 23 nt, Artificial Sequence
  Description of Artificial Sequence: Synthetic oligonucleotide
ugaaggaggccacgaggaucgaa

SEQ ID NO: 190 - RNA, 23 nt, Artificial Sequence
  Description of Artificial Sequence: Synthetic oligonucleotide
uauucaggaaggaggccacgagg

SEQ ID NO: 191 - RNA, 23 nt, Artificial Sequence
  Description of Artificial Sequence: Synthetic oligonucleotide
uccaaggauucaggaaggaggcc

SEQ ID NO: 192 - RNA, 23 nt, Artificial Sequence
  Description of Artificial Sequence: Synthetic oligonucleotide
ucaguaauccaaggauucaggaa

SEQ ID NO: 193 - RNA, 23 nt, Artificial Sequence
  Description of Artificial Sequence: Synthetic oligonucleotide
uuagguccaguaauccaaggauu

SEQ ID NO: 194 - RNA, 23 nt, Artificial Sequence
  Description of Artificial Sequence: Synthetic oligonucleotide
uggucagugagccuggguagguc

SEQ ID NO: 195 - RNA, 23 nt, Artificial Sequence
  Description of Artificial Sequence: Synthetic oligonucleotide
ugucacacauuccagaagaggag

SEQ ID NO: 196 - RNA, 23 nt, Artificial Sequence
  Description of Artificial Sequence: Synthetic oligonucleotide
uaauccaggucacacauuccaga

SEQ ID NO: 197 - RNA, 23 nt, Artificial Sequence
  Description of Artificial Sequence: Synthetic oligonucleotide
uugagcacaauccaggucacaca

SEQ ID NO: 198 - RNA, 23 nt, Artificial Sequence
  Description of Artificial Sequence: Synthetic oligonucleotide
uguuccuugagcacaauccaggu

SEQ ID NO: 199 - RNA, 23 nt, Artificial Sequence
  Description of Artificial Sequence: Synthetic oligonucleotide
uacgcugauggguuccuugagca

SEQ ID NO: 200 - RNA, 23 nt, Artificial Sequence
  Description of Artificial Sequence: Synthetic oligonucleotide
ucugcugacgcugauggguuccu

SEQ ID NO: 201 - RNA, 23 nt, Artificial Sequence
  Description of Artificial Sequence: Synthetic oligonucleotide
uaguuguccaccaucaguucuuc

SEQ ID NO: 202 - RNA, 23 nt, Artificial Sequence
  Description of Artificial Sequence: Synthetic oligonucleotide
uggaauuucaacaccugcucgcu

SEQ ID NO: 203 - RNA, 23 nt, Artificial Sequence
  Description of Artificial Sequence: Synthetic oligonucleotide
uguuuacggaauuucaacaccug

SEQ ID NO: 204 - RNA, 23 nt, Artificial Sequence
  Description of Artificial Sequence: Synthetic oligonucleotide
uaguuaaguuuacggaauuucaa

SEQ ID NO: 205 - RNA, 23 nt, Artificial Sequence
  Description of Artificial Sequence: Synthetic oligonucleotide
ucauugaaguuaaguuuacggaa

SEQ ID NO: 206 - RNA, 23 nt, Artificial Sequence
  Description of Artificial Sequence: Synthetic oligonucleotide
uaguucuucggguucacccuccc

SEQ ID NO: 207 - RNA, 23 nt, Artificial Sequence
  Description of Artificial Sequence: Synthetic oligonucleotide
uaccaucaguucuucggguucac

SEQ ID NO: 208 - RNA, 23 nt, Artificial Sequence
  Description of Artificial Sequence: Synthetic oligonucleotide
ugggcgccaguuguccaccauca

SEQ ID NO: 209 - RNA, 23 nt, Artificial Sequence
  Description of Artificial Sequence: Synthetic oligonucleotide
uuucuucaguggcugagcugggc

SEQ ID NO: 210 - RNA, 23 nt, Artificial Sequence
  Description of Artificial Sequence: Synthetic oligonucleotide
uugccuguucuucaguggcugag

SEQ ID NO: 211 - RNA, 23 nt, Artificial Sequence
  Description of Artificial Sequence: Synthetic oligonucleotide
uuugauuugccuguucuucagug

SEQ ID NO: 212 - RNA, 23 nt, Artificial Sequence
  Description of Artificial Sequence: Synthetic oligonucleotide
ucauauuugguguuccagugaac

SEQ ID NO: 213 - RNA, 23 nt, Artificial Sequence
  Description of Artificial Sequence: Synthetic oligonucleotide
ugaaggaagcuuugauuugccug

SEQ ID NO: 214 - RNA, 23 nt, Artificial Sequence
  Description of Artificial Sequence: Synthetic oligonucleotide
ucuuauuugaaggaagcuuugau

SEQ ID NO: 215 - RNA, 23 nt, Artificial Sequence
  Description of Artificial Sequence: Synthetic oligonucleotide
ugaccaucuuauuugaaggaagc

SEQ ID NO: 216 - RNA, 23 nt, Artificial Sequence
  Description of Artificial Sequence: Synthetic oligonucleotide
uagacuaugggaccaucuuauuu

SEQ ID NO: 217 - RNA, 23 nt, Artificial Sequence
  Description of Artificial Sequence: Synthetic oligonucleotide
uggauacagacuaugggaccauc

SEQ ID NO: 218 - RNA, 23 nt, Artificial Sequence
  Description of Artificial Sequence: Synthetic oligonucleotide
uauuauuuggauacagacuaugg

SEQ ID NO: 219 - RNA, 23 nt, Artificial Sequence
  Description of Artificial Sequence: Synthetic oligonucleotide
uaagauucauuauuuggauacag

SEQ ID NO: 220 - RNA, 23 nt, Artificial Sequence
  Description of Artificial Sequence: Synthetic oligonucleotide
uaacacccgaagauucauuauuu

SEQ ID NO: 221 - RNA, 23 nt, Artificial Sequence
  Description of Artificial Sequence: Synthetic oligonucleotide
uaaagggaaacacccgaagauuc

SEQ ID NO: 222 - RNA, 23 nt, Artificial Sequence
  Description of Artificial Sequence: Synthetic oligonucleotide
uuuagcuaaagggaaacacccga

SEQ ID NO: 223 - RNA, 23 nt, Artificial Sequence
  Description of Artificial Sequence: Synthetic oligonucleotide
uaucugugcuuagcuaaagggaa

SEQ ID NO: 224 - RNA, 23 nt, Artificial Sequence
  Description of Artificial Sequence: Synthetic oligonucleotide
uagguagaucugugcuuagcuaa

SEQ ID NO: 225 - RNA, 23 nt, Artificial Sequence
  Description of Artificial Sequence: Synthetic oligonucleotide
uaaaucaccaagguagaucugug

SEQ ID NO: 226 - RNA, 23 nt, Artificial Sequence
  Description of Artificial Sequence: Synthetic oligonucleotide
uaggguccaaaucaccaagguag

SEQ ID NO: 227 - RNA, 23 nt, Artificial Sequence
  Description of Artificial Sequence: Synthetic oligonucleotide
uacaaagcaaccaggguccaaau

SEQ ID NO: 228 - RNA, 23 nt, Artificial Sequence
  Description of Artificial Sequence: Synthetic oligonucleotide
uacuagacacaaagcaaccaggg

SEQ ID NO: 229 - RNA, 23 nt, Artificial Sequence
  Description of Artificial Sequence: Synthetic oligonucleotide
uuagaaaacuagacacaaagcaa

SEQ ID NO: 230 - RNA, 23 nt, Artificial Sequence
  Description of Artificial Sequence: Synthetic oligonucleotide
uugaagggucuagaaaacuagac

SEQ ID NO: 231 - RNA, 23 nt, Artificial Sequence
  Description of Artificial Sequence: Synthetic oligonucleotide
uaagagaugaagggucuagaaaa

SEQ ID NO: 232 - RNA, 23 nt, Artificial Sequence
  Description of Artificial Sequence: Synthetic oligonucleotide
uucaaguaagagaugaagggucu

SEQ ID NO: 233 - RNA, 23 nt, Artificial Sequence
  Description of Artificial Sequence: Synthetic oligonucleotide
uaagucuaucaaguaagagauga

SEQ ID NO: 234 - RNA, 23 nt, Artificial Sequence
  Description of Artificial Sequence: Synthetic oligonucleotide
uauuaguaagucuaucaaguaag

SEQ ID NO: 235 - RNA, 23 nt, Artificial Sequence
  Description of Artificial Sequence: Synthetic oligonucleotide
ucuucacauuuuauuaguaaguc

SEQ ID NO: 236 - RNA, 23 nt, Artificial Sequence
  Description of Artificial Sequence: Synthetic oligonucleotide
uuggucuagucuucacauuuuau

SEQ ID NO: 237 - RNA, 23 nt, Artificial Sequence
  Description of Artificial Sequence: Synthetic oligonucleotide
ugacaauuggucuagucuucaca

SEQ ID NO: 238 - RNA, 23 nt, Artificial Sequence
  Description of Artificial Sequence: Synthetic oligonucleotide
ucaagcaugacaauuggucuagu

SEQ ID NO: 239 - RNA, 23 nt, Artificial Sequence
  Description of Artificial Sequence: Synthetic oligonucleotide
uagcaguugugucaagcaugaca

SEQ ID NO: 240 - RNA, 23 nt, Artificial Sequence
  Description of Artificial Sequence: Synthetic oligonucleotide
uagccacagcaguugugucaagc

SEQ ID NO: 241 - RNA, 23 nt, Artificial Sequence
  Description of Artificial Sequence: Synthetic oligonucleotide
uaaagcaccaaccagccacagca

SEQ ID NO: 242 - RNA, 23 nt, Artificial Sequence
  Description of Artificial Sequence: Synthetic oligonucleotide
uauaaacaaagcaccaaccagcc

SEQ ID NO: 243 - RNA, 23 nt, Artificial Sequence
  Description of Artificial Sequence: Synthetic oligonucleotide
uacuaccauaaacaaagcaccaa

SEQ ID NO: 244 - RNA, 23 nt, Artificial Sequence
  Description of Artificial Sequence: Synthetic oligonucleotide
uaaaacuacuaccauaaacaaag

SEQ ID NO: 245 - RNA, 23 nt, Artificial Sequence
  Description of Artificial Sequence: Synthetic oligonucleotide
uuuacagaaaaacuacuaccaua

SEQ ID NO: 246 - RNA, 23 nt, Artificial Sequence
  Description of Artificial Sequence: Synthetic oligonucleotide
uucuguguuacagaaaaacuacu

SEQ ID NO: 247 - RNA, 23 nt, Artificial Sequence
  Description of Artificial Sequence: Synthetic oligonucleotide
ucuauauucuguguuacagaaaa

SEQ ID NO: 248 - RNA, 23 nt, Artificial Sequence
  Description of Artificial Sequence: Synthetic oligonucleotide
uuucuuauccuauauucuguguu

SEQ ID NO: 249 - RNA, 23 nt, Artificial Sequence
  Description of Artificial Sequence: Synthetic oligonucleotide
uaagucaagguacuuuauucuua

SEQ ID NO: 250 - RNA, 23 nt, Artificial Sequence
  Description of Artificial Sequence: Synthetic oligonucleotide
uaugcugugaacaaagucaaggu

SEQ ID NO: 251 - RNA, 23 nt, Artificial Sequence
  Description of Artificial Sequence: Synthetic oligonucleotide
ucccuacaugcugugaacaaagu

SEQ ID NO: 252 - RNA, 23 nt, Artificial Sequence
  Description of Artificial Sequence: Synthetic oligonucleotide
uucaucacccuacaugcugugaa

SEQ ID NO: 253 - RNA, 23 nt, Artificial Sequence
  Description of Artificial Sequence: Synthetic oligonucleotide
uugugagugcucaucacccuaca

SEQ ID NO: 254 - RNA, 23 nt, Artificial Sequence
  Description of Artificial Sequence: Synthetic oligonucleotide
uaacaauugugagugcucaucac

SEQ ID NO: 255 - RNA, 23 nt, Artificial Sequence
  Description of Artificial Sequence: Synthetic oligonucleotide
uuuuagucaacaauugugagugc

SEQ ID NO: 256 - RNA, 23 nt, Artificial Sequence
  Description of Artificial Sequence: Synthetic oligonucleotide
uaaaagcagcauuuuagucaaca

SEQ ID NO: 257 - RNA, 23 nt, Artificial Sequence
  Description of Artificial Sequence: Synthetic oligonucleotide
ucuauguuuuaaaagcagcauuu

SEQ ID NO: 258 - RNA, 23 nt, Artificial Sequence
  Description of Artificial Sequence: Synthetic oligonucleotide
uacuuuccuauguuuuaaaagca

SEQ ID NO: 259 - RNA, 23 nt, Artificial Sequence
  Description of Artificial Sequence: Synthetic oligonucleotide
uaaccauucuacuuuccuauguu

SEQ ID NO: 260 - RNA, 23 nt, Artificial Sequence
  Description of Artificial Sequence: Synthetic oligonucleotide
uuugcacucaaccauucuacuuu

SEQ ID NO: 261 - RNA, 23 nt, Artificial Sequence
  Description of Artificial Sequence: Synthetic oligonucleotide
uauggauuugcacucaaccauuc

SEQ ID NO: 262 - RNA, 23 nt, Artificial Sequence
  Description of Artificial Sequence: Synthetic oligonucleotide
uuugugcuauggauuugcacuca

SEQ ID NO: 263 - RNA, 23 nt, Artificial Sequence
  Description of Artificial Sequence: Synthetic oligonucleotide
uaauuuaucuugugcuauggauu

SEQ ID NO: 264 - RNA, 23 nt, Artificial Sequence
  Description of Artificial Sequence: Synthetic oligonucleotide
uaacuagcucaauuuaucuugug

SEQ ID NO: 265 - RNA, 23 nt, Artificial Sequence
  Description of Artificial Sequence: Synthetic oligonucleotide
uugauuugccuuaacuagcucaa

SEQ ID NO: 266 - RNA, 23 nt, Artificial Sequence
  Description of Artificial Sequence: Synthetic oligonucleotide
uauuuuaccugauuugccuuaac

SEQ ID NO: 267 - RNA, 23 nt, Artificial Sequence
  Description of Artificial Sequence: Synthetic oligonucleotide
ugaaucaugacuauuuuaccuga

SEQ ID NO: 268 - RNA, 23 nt, Artificial Sequence
  Description of Artificial Sequence: Synthetic oligonucleotide
uacauuacauagaaucaugacua

SEQ ID NO: 269 - RNA, 23 nt, Artificial Sequence
  Description of Artificial Sequence: Synthetic oligonucleotide
uuuucugguuuacauuacauaga

SEQ ID NO: 270 - RNA, 23 nt, Artificial Sequence
  Description of Artificial Sequence: Synthetic oligonucleotide
uauaacaucuugaaaucaugaac

SEQ ID NO: 271 - RNA, 23 nt, Artificial Sequence
  Description of Artificial Sequence: Synthetic oligonucleotide
uauaucucuguaauucaaaaguc

SEQ ID NO: 272 - RNA, 23 nt, Artificial Sequence
  Description of Artificial Sequence: Synthetic oligonucleotide
uacucuguaucacaacucuaauu

SEQ ID NO: 273 - RNA, 23 nt, Artificial Sequence
  Description of Artificial Sequence: Synthetic oligonucleotide
ugaauggaaauauacucuguauc

SEQ ID NO: 274 - RNA, 23 nt, Artificial Sequence
  Description of Artificial Sequence: Synthetic oligonucleotide
uuauugucugaauggaaauauac

SEQ ID NO: 275 - RNA, 23 nt, Artificial Sequence
  Description of Artificial Sequence: Synthetic oligonucleotide
uguuaugauauauugucugaaug

SEQ ID NO: 276 - RNA, 23 nt, Artificial Sequence
  Description of Artificial Sequence: Synthetic oligonucleotide
uaaauauacucuguaucacaacu

SEQ ID NO: 277 - RNA, 21 nt, Artificial Sequence
  Description of Artificial Sequence: Synthetic oligonucleotide
agaucggugccgauuccugcu

SEQ ID NO: 278 - RNA, 21 nt, Artificial Sequence
  Description of Artificial Sequence: Synthetic oligonucleotide
cgcgaccaugucccaucacuu

SEQ ID NO: 279 - RNA, 21 nt, Artificial Sequence
  Description of Artificial Sequence: Synthetic oligonucleotide
guacggcaaacacaacggacu

SEQ ID NO: 280 - RNA, 21 nt, Artificial Sequence
  Description of Artificial Sequence: Synthetic oligonucleotide
caaacacaacggaccugagcu

SEQ ID NO: 281 - RNA, 21 nt, Artificial Sequence
  Description of Artificial Sequence: Synthetic oligonucleotide
ggaccugagcacuggcauaau

SEQ ID NO: 282 - RNA, 21 nt, Artificial Sequence
  Description of Artificial Sequence: Synthetic oligonucleotide
gagcacuggcauaaggacuuu

SEQ ID NO: 283 - RNA, 21 nt, Artificial Sequence
  Description of Artificial Sequence: Synthetic oligonucleotide
guugacaucgacacucauacu

SEQ ID NO: 284 - RNA, 21 nt, Artificial Sequence
  Description of Artificial Sequence: Synthetic oligonucleotide
acacucauacagccaaguauu

SEQ ID NO: 285 - RNA, 21 nt, Artificial Sequence
  Description of Artificial Sequence: Synthetic oligonucleotide
uacagccaaguaugacccuuu

SEQ ID NO: 286 - RNA, 21 nt, Artificial Sequence
  Description of Artificial Sequence: Synthetic oligonucleotide
caaguaugacccuucccugau

SEQ ID NO: 287 - RNA, 21 nt, Artificial Sequence
  Description of Artificial Sequence: Synthetic oligonucleotide
ugucuguuuccuaugaucaau

SEQ ID NO: 288 - RNA, 21 nt, Artificial Sequence
  Description of Artificial Sequence: Synthetic oligonucleotide
ccuaugaucaagcaacuuccu

SEQ ID NO: 289 - RNA, 21 nt, Artificial Sequence
  Description of Artificial Sequence: Synthetic oligonucleotide
caagcaacuucccugaggauu

SEQ ID NO: 290 - RNA, 21 nt, Artificial Sequence
  Description of Artificial Sequence: Synthetic oligonucleotide
cccugaggauccucaacaauu

SEQ ID NO: 291 - RNA, 21 nt, Artificial Sequence
  Description of Artificial Sequence: Synthetic oligonucleotide
uccucaacaauggucaugcuu

SEQ ID NO: 292 - RNA, 21 nt, Artificial Sequence
  Description of Artificial Sequence: Synthetic oligonucleotide
acaauggucaugcuuucaacu

SEQ ID NO: 293 - RNA, 21 nt, Artificial Sequence
  Description of Artificial Sequence: Synthetic oligonucleotide
augcuuucaacguggaguuuu

SEQ ID NO: 294 - RNA, 21 nt, Artificial Sequence
  Description of Artificial Sequence: Synthetic oligonucleotide
aacguggaguuugaugacucu

SEQ ID NO: 295 - RNA, 21 nt, Artificial Sequence
  Description of Artificial Sequence: Synthetic oligonucleotide
ugaugacucucaggacaaagu

SEQ ID NO: 296 - RNA, 21 nt, Artificial Sequence
  Description of Artificial Sequence: Synthetic oligonucleotide
ucucaggacaaagcagugcuu

SEQ ID NO: 297 - RNA, 21 nt, Artificial Sequence
  Description of Artificial Sequence: Synthetic oligonucleotide
gacaaagcagugcucaagggu

SEQ ID NO: 298 - RNA, 21 nt, Artificial Sequence
  Description of Artificial Sequence: Synthetic oligonucleotide
uggcacuuacagauugauucu

SEQ ID NO: 299 - RNA, 21 nt, Artificial Sequence
  Description of Artificial Sequence: Synthetic oligonucleotide
uuacagauugauucaguuucu

SEQ ID NO: 300 - RNA, 21 nt, Artificial Sequence
  Description of Artificial Sequence: Synthetic oligonucleotide
auucaguuucacuuucacugu

SEQ ID NO: 301 - RNA, 21 nt, Artificial Sequence
  Description of Artificial Sequence: Synthetic oligonucleotide
ucacuugauggacaagguucu

SEQ ID NO: 302 - RNA, 21 nt, Artificial Sequence
  Description of Artificial Sequence: Synthetic oligonucleotide
gauggacaagguucagagcau

SEQ ID NO: 303 - RNA, 21 nt, Artificial Sequence
  Description of Artificial Sequence: Synthetic oligonucleotide
caagguucagagcauacuguu

SEQ ID NO: 304 - RNA, 21 nt, Artificial Sequence
  Description of Artificial Sequence: Synthetic oligonucleotide
ucagagcauacuguggauaau

SEQ ID NO: 305 - RNA, 21 nt, Artificial Sequence
  Description of Artificial Sequence: Synthetic oligonucleotide
aagaaauaugcugcagaacuu

SEQ ID NO: 306 - RNA, 21 nt, Artificial Sequence
  Description of Artificial Sequence: Synthetic oligonucleotide
uaugcugcagaacuucacuuu

SEQ ID NO: 307 - RNA, 21 nt, Artificial Sequence
  Description of Artificial Sequence: Synthetic oligonucleotide
gcagaacuucacuugguucau

SEQ ID NO: 308 - RNA, 21 nt, Artificial Sequence
  Description of Artificial Sequence: Synthetic oligonucleotide
cuucacuugguucacuggaau

SEQ ID NO: 309 - RNA, 21 nt, Artificial Sequence
  Description of Artificial Sequence: Synthetic oligonucleotide
ucacuggaacaccaaauaugu

SEQ ID NO: 310 - RNA, 21 nt, Artificial Sequence
  Description of Artificial Sequence: Synthetic oligonucleotide
uuugggaaagcugugcagcau

SEQ ID NO: 311 - RNA, 21 nt, Artificial Sequence
  Description of Artificial Sequence: Synthetic oligonucleotide
gugcagcaaccugauggacuu

SEQ ID NO: 312 - RNA, 21 nt, Artificial Sequence
  Description of Artificial Sequence: Synthetic oligonucleotide
caaccugauggacuggccguu

SEQ ID NO: 313 - RNA, 21 nt, Artificial Sequence
  Description of Artificial Sequence: Synthetic oligonucleotide
cuggccguucuagguauuuuu

SEQ ID NO: 314 - RNA, 21 nt, Artificial Sequence
  Description of Artificial Sequence: Synthetic oligonucleotide
ugaagguuggcagcgcuaaau

SEQ ID NO: 315 - RNA, 21 nt, Artificial Sequence
  Description of Artificial Sequence: Synthetic oligonucleotide
gcagcgcuaaaccgggccuuu

SEQ ID NO: 316 - RNA, 21 nt, Artificial Sequence
  Description of Artificial Sequence: Synthetic oligonucleotide
ccgggccuucagaaaguuguu

SEQ ID NO: 317 - RNA, 21 nt, Artificial Sequence
  Description of Artificial Sequence: Synthetic oligonucleotide
cuucagaaaguuguugauguu

SEQ ID NO: 318 - RNA, 21 nt, Artificial Sequence
  Description of Artificial Sequence: Synthetic oligonucleotide
guuguugaugugcuggauucu

SEQ ID NO: 319 - RNA, 21 nt, Artificial Sequence
  Description of Artificial Sequence: Synthetic oligonucleotide
gcuggauuccauuaaaacaau

SEQ ID NO: 320 - RNA, 21 nt, Artificial Sequence
  Description of Artificial Sequence: Synthetic oligonucleotide
uccauuaaaacaaagggcaau

SEQ ID NO: 321 - RNA, 21 nt, Artificial Sequence
  Description of Artificial Sequence: Synthetic oligonucleotide
aaaacaaagggcaagagugcu

SEQ ID NO: 322 - RNA, 21 nt, Artificial Sequence
  Description of Artificial Sequence: Synthetic oligonucleotide
ggcaagagugcugacuucacu

SEQ ID NO: 323 - RNA, 21 nt, Artificial Sequence
  Description of Artificial Sequence: Synthetic oligonucleotide
gugcugacuucacuaacuucu

SEQ ID NO: 324 - RNA, 21 nt, Artificial Sequence
  Description of Artificial Sequence: Synthetic oligonucleotide
acuucacuaacuucgauccuu

SEQ ID NO: 325 - RNA, 21 nt, Artificial Sequence
  Description of Artificial Sequence: Synthetic oligonucleotide
cgauccucguggccuccuucu

SEQ ID NO: 326 - RNA, 21 nt, Artificial Sequence
  Description of Artificial Sequence: Synthetic oligonucleotide
ucguggccuccuuccugaauu

SEQ ID NO: 327 - RNA, 21 nt, Artificial Sequence
  Description of Artificial Sequence: Synthetic oligonucleotide
ccuccuuccugaauccuuggu

SEQ ID NO: 328 - RNA, 21 nt, Artificial Sequence
  Description of Artificial Sequence: Synthetic oligonucleotide
ccugaauccuuggauuacugu

SEQ ID NO: 329 - RNA, 21 nt, Artificial Sequence
  Description of Artificial Sequence: Synthetic oligonucleotide
uccuuggauuacuggaccuau

SEQ ID NO: 330 - RNA, 21 nt, Artificial Sequence
  Description of Artificial Sequence: Synthetic oligonucleotide
ccuacccaggcucacugaccu

SEQ ID NO: 331 - RNA, 21 nt, Artificial Sequence
  Description of Artificial Sequence: Synthetic oligonucleotide
ccucuucuggaaugugugacu

SEQ ID NO: 332 - RNA, 21 nt, Artificial Sequence
  Description of Artificial Sequence: Synthetic oligonucleotide
uggaaugugugaccuggauuu

SEQ ID NO: 333 - RNA, 21 nt, Artificial Sequence
  Description of Artificial Sequence: Synthetic oligonucleotide
ugugaccuggauugugcucau

SEQ ID NO: 334 - RNA, 21 nt, Artificial Sequence
  Description of Artificial Sequence: Synthetic oligonucleotide
cuggauugugcucaaggaacu

SEQ ID NO: 335 - RNA, 21 nt, Artificial Sequence
  Description of Artificial Sequence: Synthetic oligonucleotide
cucaaggaacccaucagcguu

SEQ ID NO: 336 - RNA, 21 nt, Artificial Sequence
  Description of Artificial Sequence: Synthetic oligonucleotide
gaacccaucagcgucagcagu

SEQ ID NO: 337 - RNA, 21 nt, Artificial Sequence
  Description of Artificial Sequence: Synthetic oligonucleotide
cgagcagguguugaaauuccu

SEQ ID NO: 338 - RNA, 21 nt, Artificial Sequence
  Description of Artificial Sequence: Synthetic oligonucleotide
gguguugaaauuccguaaacu

SEQ ID NO: 339 - RNA, 21 nt, Artificial Sequence
  Description of Artificial Sequence: Synthetic oligonucleotide
gaaauuccguaaacuuaacuu

SEQ ID NO: 340 - RNA, 21 nt, Artificial Sequence
  Description of Artificial Sequence: Synthetic oligonucleotide
ccguaaacuuaacuucaaugu

SEQ ID NO: 341 - RNA, 21 nt, Artificial Sequence
  Description of Artificial Sequence: Synthetic oligonucleotide
gagggugaacccgaagaacuu

SEQ ID NO: 342 - RNA, 21 nt, Artificial Sequence
  Description of Artificial Sequence: Synthetic oligonucleotide
gaacccgaagaacugaugguu

SEQ ID NO: 343 - RNA, 21 nt, Artificial Sequence
  Description of Artificial Sequence: Synthetic oligonucleotide
agaacugaugguggacaacuu

SEQ ID NO: 344 - RNA, 21 nt, Artificial Sequence
  Description of Artificial Sequence: Synthetic oligonucleotide
augguggacaacuggcgcccu

SEQ ID NO: 345 - RNA, 21 nt, Artificial Sequence
  Description of Artificial Sequence: Synthetic oligonucleotide
ccagcucagccacugaagaau

SEQ ID NO: 346 - RNA, 21 nt, Artificial Sequence
  Description of Artificial Sequence: Synthetic oligonucleotide
cagccacugaagaacaggcau

SEQ ID NO: 347 - RNA, 21 nt, Artificial Sequence
  Description of Artificial Sequence: Synthetic oligonucleotide
cugaagaacaggcaaaucaau

SEQ ID NO: 348 - RNA, 21 nt, Artificial Sequence
  Description of Artificial Sequence: Synthetic oligonucleotide
ggcaaaucaaagcuuccuucu

SEQ ID NO: 349 - RNA, 21 nt, Artificial Sequence
  Description of Artificial Sequence: Synthetic oligonucleotide
caaagcuuccuucaaauaagu

SEQ ID NO: 350 - RNA, 21 nt, Artificial Sequence
  Description of Artificial Sequence: Synthetic oligonucleotide
uuccuucaaauaagauggucu

SEQ ID NO: 351 - RNA, 21 nt, Artificial Sequence
  Description of Artificial Sequence: Synthetic oligonucleotide
auaagauggucccauagucuu

SEQ ID NO: 352 - RNA, 21 nt, Artificial Sequence
  Description of Artificial Sequence: Synthetic oligonucleotide
uggucccauagucuguauccu

SEQ ID NO: 353 - RNA, 21 nt, Artificial Sequence
  Description of Artificial Sequence: Synthetic oligonucleotide
auagucuguauccaaauaauu

SEQ ID NO: 354 - RNA, 21 nt, Artificial Sequence
  Description of Artificial Sequence: Synthetic oligonucleotide
guauccaaauaaugaaucuuu

SEQ ID NO: 355 - RNA, 21 nt, Artificial Sequence
  Description of Artificial Sequence: Synthetic oligonucleotide
auaaugaaucuucggguguuu

SEQ ID NO: 356 - RNA, 21 nt, Artificial Sequence
  Description of Artificial Sequence: Synthetic oligonucleotide
aucuucggguguuucccuuuu

SEQ ID NO: 357 - RNA, 21 nt, Artificial Sequence
  Description of Artificial Sequence: Synthetic oligonucleotide
ggguguuucccuuuagcuaau

SEQ ID NO: 358 - RNA, 21 nt, Artificial Sequence
  Description of Artificial Sequence: Synthetic oligonucleotide
cccuuuagcuaagcacagauu

SEQ ID NO: 359 - RNA, 21 nt, Artificial Sequence
  Description of Artificial Sequence: Synthetic oligonucleotide
agcuaagcacagaucuaccuu

SEQ ID NO: 360 - RNA, 21 nt, Artificial Sequence
  Description of Artificial Sequence: Synthetic oligonucleotide
cagaucuaccuuggugauuuu

SEQ ID NO: 361 - RNA, 21 nt, Artificial Sequence
  Description of Artificial Sequence: Synthetic oligonucleotide
accuuggugauuuggacccuu

SEQ ID NO: 362 - RNA, 21 nt, Artificial Sequence
  Description of Artificial Sequence: Synthetic oligonucleotide
uuggacccugguugcuuuguu

SEQ ID NO: 363 - RNA, 21 nt, Artificial Sequence
  Description of Artificial Sequence: Synthetic oligonucleotide
cugguugcuuugugucuaguu

SEQ ID NO: 364 - RNA, 21 nt, Artificial Sequence
  Description of Artificial Sequence: Synthetic oligonucleotide
gcuuugugucuaguuuucuau

SEQ ID NO: 365 - RNA, 21 nt, Artificial Sequence
  Description of Artificial Sequence: Synthetic oligonucleotide
cuaguuuucuagacccuucau

SEQ ID NO: 366 - RNA, 21 nt, Artificial Sequence
  Description of Artificial Sequence: Synthetic oligonucleotide
uucuagacccuucaucucuuu

SEQ ID NO: 367 - RNA, 21 nt, Artificial Sequence
  Description of Artificial Sequence: Synthetic oligonucleotide
acccuucaucucuuacuugau

SEQ ID NO: 368 - RNA, 21 nt, Artificial Sequence
  Description of Artificial Sequence: Synthetic oligonucleotide
aucucuuacuugauagacuuu

SEQ ID NO: 369 - RNA, 21 nt, Artificial Sequence
  Description of Artificial Sequence: Synthetic oligonucleotide
uacuugauagacuuacuaauu

SEQ ID NO: 370 - RNA, 21 nt, Artificial Sequence
  Description of Artificial Sequence: Synthetic oligonucleotide
cuuacuaauaaaaugugaagu

SEQ ID NO: 371 - RNA, 21 nt, Artificial Sequence
  Description of Artificial Sequence: Synthetic oligonucleotide
aaaaugugaagacuagaccau

SEQ ID NO: 372 - RNA, 21 nt, Artificial Sequence
  Description of Artificial Sequence: Synthetic oligonucleotide
ugaagacuagaccaauugucu

SEQ ID NO: 373 - RNA, 21 nt, Artificial Sequence
  Description of Artificial Sequence: Synthetic oligonucleotide
uagaccaauugucaugcuugu

SEQ ID NO: 374 - RNA, 21 nt, Artificial Sequence
  Description of Artificial Sequence: Synthetic oligonucleotide
ucaugcuugacacaacugcuu

SEQ ID NO: 375 - RNA, 21 nt, Artificial Sequence
  Description of Artificial Sequence: Synthetic oligonucleotide
uugacacaacugcuguggcuu

SEQ ID NO: 376 - RNA, 21 nt, Artificial Sequence
  Description of Artificial Sequence: Synthetic oligonucleotide
cuguggcugguuggugcuuuu

SEQ ID NO: 377 - RNA, 21 nt, Artificial Sequence
  Description of Artificial Sequence: Synthetic oligonucleotide
cugguuggugcuuuguuuauu

SEQ ID NO: 378 - RNA, 21 nt, Artificial Sequence
  Description of Artificial Sequence: Synthetic oligonucleotide
ggugcuuuguuuaugguaguu

SEQ ID NO: 379 - RNA, 21 nt, Artificial Sequence
  Description of Artificial Sequence: Synthetic oligonucleotide
uuguuuaugguaguaguuuuu

SEQ ID NO: 380 - RNA, 21 nt, Artificial Sequence
  Description of Artificial Sequence: Synthetic oligonucleotide
ugguaguaguuuuucuguaau

SEQ ID NO: 381 - RNA, 21 nt, Artificial Sequence
  Description of Artificial Sequence: Synthetic oligonucleotide
uaguuuuucuguaacacagau

SEQ ID NO: 382 - RNA, 21 nt, Artificial Sequence
  Description of Artificial Sequence: Synthetic oligonucleotide
uucuguaacacagaauauagu

SEQ ID NO: 383 - RNA, 21 nt, Artificial Sequence
  Description of Artificial Sequence: Synthetic oligonucleotide
cacagaauauaggauaagaau

SEQ ID NO: 384 - RNA, 21 nt, Artificial Sequence
  Description of Artificial Sequence: Synthetic oligonucleotide
agaauaaaguaccuugacuuu

SEQ ID NO: 385 - RNA, 21 nt, Artificial Sequence
  Description of Artificial Sequence: Synthetic oligonucleotide
cuugacuuuguucacagcauu

SEQ ID NO: 386 - RNA, 21 nt, Artificial Sequence
  Description of Artificial Sequence: Synthetic oligonucleotide
uuuguucacagcauguagggu

SEQ ID NO: 387 - RNA, 21 nt, Artificial Sequence
  Description of Artificial Sequence: Synthetic oligonucleotide
cacagcauguagggugaugau

SEQ ID NO: 388 - RNA, 21 nt, Artificial Sequence
  Description of Artificial Sequence: Synthetic oligonucleotide
uagggugaugagcacucacau

SEQ ID NO: 389 - RNA, 21 nt, Artificial Sequence
  Description of Artificial Sequence: Synthetic oligonucleotide
gaugagcacucacaauuguuu

SEQ ID NO: 390 - RNA, 21 nt, Artificial Sequence
  Description of Artificial Sequence: Synthetic oligonucleotide
acucacaauuguugacuaaau

SEQ ID NO: 391 - RNA, 21 nt, Artificial Sequence
  Description of Artificial Sequence: Synthetic oligonucleotide
uugacuaaaaugcugcuuuuu

SEQ ID NO: 392 - RNA, 21 nt, Artificial Sequence
  Description of Artificial Sequence: Synthetic oligonucleotide
augcugcuuuuaaaacauagu

SEQ ID NO: 393 - RNA, 21 nt, Artificial Sequence
  Description of Artificial Sequence: Synthetic oligonucleotide
cuuuuaaaacauaggaaaguu

SEQ ID NO: 394 - RNA, 21 nt, Artificial Sequence
  Description of Artificial Sequence: Synthetic oligonucleotide
cauaggaaaguagaaugguuu

SEQ ID NO: 395 - RNA, 21 nt, Artificial Sequence
  Description of Artificial Sequence: Synthetic oligonucleotide
aguagaaugguugagugcaau

SEQ ID NO: 396 - RNA, 21 nt, Artificial Sequence
  Description of Artificial Sequence: Synthetic oligonucleotide
augguugagugcaaauccauu

SEQ ID NO: 397 - RNA, 21 nt, Artificial Sequence
  Description of Artificial Sequence: Synthetic oligonucleotide
agugcaaauccauagcacaau

SEQ ID NO: 398 - RNA, 21 nt, Artificial Sequence
  Description of Artificial Sequence: Synthetic oligonucleotide
uccauagcacaagauaaauuu

SEQ ID NO: 399 - RNA, 21 nt, Artificial Sequence
  Description of Artificial Sequence: Synthetic oligonucleotide
caagauaaauugagcuaguuu

SEQ ID NO: 400 - RNA, 21 nt, Artificial Sequence
  Description of Artificial Sequence: Synthetic oligonucleotide
gagcuaguuaaggcaaaucau

SEQ ID NO: 401 - RNA, 21 nt, Artificial Sequence
  Description of Artificial Sequence: Synthetic oligonucleotide
uaaggcaaaucagguaaaauu

SEQ ID NO: 402 - RNA, 21 nt, Artificial Sequence
  Description of Artificial Sequence: Synthetic oligonucleotide
agguaaaauagucaugauucu

SEQ ID NO: 403 - RNA, 21 nt, Artificial Sequence
  Description of Artificial Sequence: Synthetic oligonucleotide
gucaugauucuauguaauguu

SEQ ID NO: 404 - RNA, 21 nt, Artificial Sequence
  Description of Artificial Sequence: Synthetic oligonucleotide
uauguaauguaaaccagaaau

SEQ ID NO: 405 - RNA, 21 nt, Artificial Sequence
  Description of Artificial Sequence: Synthetic oligonucleotide
ucaugauuucaagauguuauu

SEQ ID NO: 406 - RNA, 21 nt, Artificial Sequence
  Description of Artificial Sequence: Synthetic oligonucleotide
cuuuugaauuacagagauauu

SEQ ID NO: 407 - RNA, 21 nt, Artificial Sequence
  Description of Artificial Sequence: Synthetic oligonucleotide
uuagaguugugauacagaguu

SEQ ID NO: 408 - RNA, 21 nt, Artificial Sequence
  Description of Artificial Sequence: Synthetic oligonucleotide
uugugauacagaguauauuuu

SEQ ID NO: 409 - RNA, 21 nt, Artificial Sequence
  Description of Artificial Sequence: Synthetic oligonucleotide
uacagaguauauuuccauucu

SEQ ID NO: 410 - RNA, 21 nt, Artificial Sequence
  Description of Artificial Sequence: Synthetic oligonucleotide
auauuuccauucagacaauau

SEQ ID NO: 411 - RNA, 21 nt, Artificial Sequence
  Description of Artificial Sequence: Synthetic oligonucleotide
uucagacaauauaucauaacu

SEQ ID NO: 412 - RNA, 23 nt, Artificial Sequence
  Description of Artificial Sequence: Synthetic oligonucleotide
agcaggaaucggcaccgaucugg

SEQ ID NO: 413 - RNA, 23 nt, Artificial Sequence
  Description of Artificial Sequence: Synthetic oligonucleotide
aagugaugggacauggucgcgcu

SEQ ID NO: 414 - RNA, 23 nt, Artificial Sequence
  Description of Artificial Sequence: Synthetic oligonucleotide
aguccguuguguuugccguaccc

SEQ ID NO: 415 - RNA, 23 nt, Artificial Sequence
  Description of Artificial Sequence: Synthetic oligonucleotide
agcucagguccguuguguuugcc

SEQ ID NO: 416 - RNA, 23 nt, Artificial Sequence
  Description of Artificial Sequence: Synthetic oligonucleotide
auuaugccagugcucagguccgu

SEQ ID NO: 417 - RNA, 23 nt, Artificial Sequence
  Description of Artificial Sequence: Synthetic oligonucleotide
aaaguccuuaugccagugcucag

SEQ ID NO: 418 - RNA, 23 nt, Artificial Sequence
  Description of Artificial Sequence: Synthetic oligonucleotide
aguaugagugucgaugucaacag

SEQ ID NO: 419 - RNA, 23 nt, Artificial Sequence
  Description of Artificial Sequence: Synthetic oligonucleotide
aauacuuggcuguaugagugucg

SEQ ID NO: 420 - RNA, 23 nt, Artificial Sequence
  Description of Artificial Sequence: Synthetic oligonucleotide
aaagggucauacuuggcuguaug

SEQ ID NO: 421 - RNA, 23 nt, Artificial Sequence
  Description of Artificial Sequence: Synthetic oligonucleotide
aucagggaagggucauacuuggc

SEQ ID NO: 422 - RNA, 23 nt, Artificial Sequence
  Description of Artificial Sequence: Synthetic oligonucleotide
auugaucauaggaaacagacagg

SEQ ID NO: 423 - RNA, 23 nt, Artificial Sequence
  Description of Artificial Sequence: Synthetic oligonucleotide
aggaaguugcuugaucauaggaa

SEQ ID NO: 424 - RNA, 23 nt, Artificial Sequence
  Description of Artificial Sequence: Synthetic oligonucleotide
aauccucagggaaguugcuugau

SEQ ID NO: 425 - RNA, 23 nt, Artificial Sequence
  Description of Artificial Sequence: Synthetic oligonucleotide
aauuguugaggauccucagggaa

SEQ ID NO: 426 - RNA, 23 nt, Artificial Sequence
  Description of Artificial Sequence: Synthetic oligonucleotide
aagcaugaccauuguugaggauc

SEQ ID NO: 427 - RNA, 23 nt, Artificial Sequence
  Description of Artificial Sequence: Synthetic oligonucleotide
aguugaaagcaugaccauuguug

SEQ ID NO: 428 - RNA, 23 nt, Artificial Sequence
  Description of Artificial Sequence: Synthetic oligonucleotide
aaaacuccacguugaaagcauga

SEQ ID NO: 429 - RNA, 23 nt, Artificial Sequence
  Description of Artificial Sequence: Synthetic oligonucleotide
agagucaucaaacuccacguuga

SEQ ID NO: 430 - RNA, 23 nt, Artificial Sequence
  Description of Artificial Sequence: Synthetic oligonucleotide
acuuuguccugagagucaucaaa

SEQ ID NO: 431 - RNA, 23 nt, Artificial Sequence
  Description of Artificial Sequence: Synthetic oligonucleotide
aagcacugcuuuguccugagagu

SEQ ID NO: 432 - RNA, 23 nt, Artificial Sequence
  Description of Artificial Sequence: Synthetic oligonucleotide
acccuugagcacugcuuuguccu

SEQ ID NO: 433 - RNA, 23 nt, Artificial Sequence
  Description of Artificial Sequence: Synthetic oligonucleotide
agaaucaaucuguaagugccauc

SEQ ID NO: 434 - RNA, 23 nt, Artificial Sequence
  Description of Artificial Sequence: Synthetic oligonucleotide
agaaacugaaucaaucuguaagu

SEQ ID NO: 435 - RNA, 23 nt, Artificial Sequence
  Description of Artificial Sequence: Synthetic oligonucleotide
acagugaaagugaaacugaauca

SEQ ID NO: 436 - RNA, 23 nt, Artificial Sequence
  Description of Artificial Sequence: Synthetic oligonucleotide
agaaccuuguccaucaagugaac

SEQ ID NO: 437 - RNA, 23 nt, Artificial Sequence
  Description of Artificial Sequence: Synthetic oligonucleotide
augcucugaaccuuguccaucaa

SEQ ID NO: 438 - RNA, 23 nt, Artificial Sequence
  Description of Artificial Sequence: Synthetic oligonucleotide
aacaguaugcucugaaccuuguc

SEQ ID NO: 439 - RNA, 23 nt, Artificial Sequence
  Description of Artificial Sequence: Synthetic oligonucleotide
auuauccacaguaugcucugaac

SEQ ID NO: 440 - RNA, 23 nt, Artificial Sequence
  Description of Artificial Sequence: Synthetic oligonucleotide
aaguucugcagcauauuucuuuu

SEQ ID NO: 441 - RNA, 23 nt, Artificial Sequence
  Description of Artificial Sequence: Synthetic oligonucleotide
aaagugaaguucugcagcauauu

SEQ ID NO: 442 - RNA, 23 nt, Artificial Sequence
  Description of Artificial Sequence: Synthetic oligonucleotide
augaaccaagugaaguucugcag

SEQ ID NO: 443 - RNA, 23 nt, Artificial Sequence
  Description of Artificial Sequence: Synthetic oligonucleotide
auuccagugaaccaagugaaguu

SEQ ID NO: 444 - RNA, 23 nt, Artificial Sequence
  Description of Artificial Sequence: Synthetic oligonucleotide
acauauuugguguuccagugaac

SEQ ID NO: 445 - RNA, 23 nt, Artificial Sequence
  Description of Artificial Sequence: Synthetic oligonucleotide
augcugcacagcuuucccaaaau

SEQ ID NO: 446 - RNA, 23 nt, Artificial Sequence
  Description of Artificial Sequence: Synthetic oligonucleotide
aaguccaucagguugcugcacag

SEQ ID NO: 447 - RNA, 23 nt, Artificial Sequence
  Description of Artificial Sequence: Synthetic oligonucleotide
aacggccaguccaucagguugcu

SEQ ID NO: 448 - RNA, 23 nt, Artificial Sequence
  Description of Artificial Sequence: Synthetic oligonucleotide
aaaaauaccuagaacggccaguc

SEQ ID NO: 449 - RNA, 23 nt, Artificial Sequence
  Description of Artificial Sequence: Synthetic oligonucleotide
auuuagcgcugccaaccuucaaa

SEQ ID NO: 450 - RNA, 23 nt, Artificial Sequence
  Description of Artificial Sequence: Synthetic oligonucleotide
aaaggcccgguuuagcgcugcca

SEQ ID NO: 451 - RNA, 23 nt, Artificial Sequence
  Description of Artificial Sequence: Synthetic oligonucleotide
aacaacuuucugaaggcccgguu

SEQ ID NO: 452 - RNA, 23 nt, Artificial Sequence
  Description of Artificial Sequence: Synthetic oligonucleotide
aacaucaacaacuuucugaaggc

SEQ ID NO: 453 - RNA, 23 nt, Artificial Sequence
  Description of Artificial Sequence: Synthetic oligonucleotide
agaauccagcacaucaacaacuu

SEQ ID NO: 454 - RNA, 23 nt, Artificial Sequence
  Description of Artificial Sequence: Synthetic oligonucleotide
auuguuuuaauggaauccagcac

SEQ ID NO: 455 - RNA, 23 nt, Artificial Sequence
  Description of Artificial Sequence: Synthetic oligonucleotide
auugcccuuuguuuuaauggaau

SEQ ID NO: 456 - RNA, 23 nt, Artificial Sequence
  Description of Artificial Sequence: Synthetic oligonucleotide
agcacucuugcccuuuguuuuaa

SEQ ID NO: 457 - RNA, 23 nt, Artificial Sequence
  Description of Artificial Sequence: Synthetic oligonucleotide
agugaagucagcacucuugcccu

SEQ ID NO: 458 - RNA, 23 nt, Artificial Sequence
  Description of Artificial Sequence: Synthetic oligonucleotide
agaaguuagugaagucagcacuc

SEQ ID NO: 459 - RNA, 23 nt, Artificial Sequence
  Description of Artificial Sequence: Synthetic oligonucleotide
aaggaucgaaguuagugaaguca

SEQ ID NO: 460 - RNA, 23 nt, Artificial Sequence
  Description of Artificial Sequence: Synthetic oligonucleotide
agaaggaggccacgaggaucgaa

SEQ ID NO: 461 - RNA, 23 nt, Artificial Sequence
  Description of Artificial Sequence: Synthetic oligonucleotide
aauucaggaaggaggccacgagg

SEQ ID NO: 462 - RNA, 23 nt, Artificial Sequence
  Description of Artificial Sequence: Synthetic oligonucleotide
accaaggauucaggaaggaggcc

SEQ ID NO: 463 - RNA, 23 nt, Artificial Sequence
  Description of Artificial Sequence: Synthetic oligonucleotide
acaguaauccaaggauucaggaa

SEQ ID NO: 464 - RNA, 23 nt, Artificial Sequence
  Description of Artificial Sequence: Synthetic oligonucleotide
auagguccaguaauccaaggauu

SEQ ID NO: 465 - RNA, 23 nt, Artificial Sequence
  Description of Artificial Sequence: Synthetic oligonucleotide
aggucagugagccuggguagguc

SEQ ID NO: 466 - RNA, 23 nt, Artificial Sequence
  Description of Artificial Sequence: Synthetic oligonucleotide
agucacacauuccagaagaggag

SEQ ID NO: 467 - RNA, 23 nt, Artificial Sequence
  Description of Artificial Sequence: Synthetic oligonucleotide
aaauccaggucacacauuccaga

SEQ ID NO: 468 - RNA, 23 nt, Artificial Sequence
  Description of Artificial Sequence: Synthetic oligonucleotide
augagcacaauccaggucacaca

SEQ ID NO: 469 - RNA, 23 nt, Artificial Sequence
  Description of Artificial Sequence: Synthetic oligonucleotide
aguuccuugagcacaauccaggu

SEQ ID NO: 470 - RNA, 23 nt, Artificial Sequence
  Description of Artificial Sequence: Synthetic oligonucleotide
aacgcugauggguuccuugagca

SEQ ID NO: 471 - RNA, 23 nt, Artificial Sequence
  Description of Artificial Sequence: Synthetic oligonucleotide
acugcugacgcugauggguuccu

SEQ ID NO: 472 - RNA, 23 nt, Artificial Sequence
  Description of Artificial Sequence: Synthetic oligonucleotide
aggaauuucaacaccugcucgcu

SEQ ID NO: 473 - RNA, 23 nt, Artificial Sequence
  Description of Artificial Sequence: Synthetic oligonucleotide
aguuuacggaauuucaacaccug

SEQ ID NO: 474 - RNA, 23 nt, Artificial Sequence
  Description of Artificial Sequence: Synthetic oligonucleotide
aaguuaaguuuacggaauuucaa

SEQ ID NO: 475 - RNA, 23 nt, Artificial Sequence
  Description of Artificial Sequence: Synthetic oligonucleotide
acauugaaguuaaguuuacggaa

SEQ ID NO: 476 - RNA, 23 nt, Artificial Sequence
  Description of Artificial Sequence: Synthetic oligonucleotide
aaguucuucggguucacccuccc

SEQ ID NO: 477 - RNA, 23 nt, Artificial Sequence
  Description of Artificial Sequence: Synthetic oligonucleotide
aaccaucaguucuucggguucac

SEQ ID NO: 478 - RNA, 23 nt, Artificial Sequence
  Description of Artificial Sequence: Synthetic oligonucleotide
aaguuguccaccaucaguucuuc

SEQ ID NO: 479 - RNA, 23 nt, Artificial Sequence
  Description of Artificial Sequence: Synthetic oligonucleotide
agggcgccaguuguccaccauca

SEQ ID NO: 480 - RNA, 23 nt, Artificial Sequence
  Description of Artificial Sequence: Synthetic oligonucleotide
auucuucaguggcugagcugggc

SEQ ID NO: 481 - RNA, 23 nt, Artificial Sequence
  Description of Artificial Sequence: Synthetic oligonucleotide
augccuguucuucaguggcugag

SEQ ID NO: 482 - RNA, 23 nt, Artificial Sequence
  Description of Artificial Sequence: Synthetic oligonucleotide
auugauuugccuguucuucagug

SEQ ID NO: 483 - RNA, 23 nt, Artificial Sequence
  Description of Artificial Sequence: Synthetic oligonucleotide
agaaggaagcuuugauuugccug

SEQ ID NO: 484 - RNA, 23 nt, Artificial Sequence
  Description of Artificial Sequence: Synthetic oligonucleotide
acuuauuugaaggaagcuuugau

SEQ ID NO: 485 - RNA, 23 nt, Artificial Sequence
  Description of Artificial Sequence: Synthetic oligonucleotide
agaccaucuuauuugaaggaagc

SEQ ID NO: 486 - RNA, 23 nt, Artificial Sequence
  Description of Artificial Sequence: Synthetic oligonucleotide
aagacuaugggaccaucuuauuu

SEQ ID NO: 487 - RNA, 23 nt, Artificial Sequence
  Description of Artificial Sequence: Synthetic oligonucleotide
aggauacagacuaugggaccauc

SEQ ID NO: 488 - RNA, 23 nt, Artificial Sequence
  Description of Artificial Sequence: Synthetic oligonucleotide
aauuauuuggauacagacuaugg

SEQ ID NO: 489 - RNA, 23 nt, Artificial Sequence
  Description of Artificial Sequence: Synthetic oligonucleotide
aaagauucauuauuuggauacag

SEQ ID NO: 490 - RNA, 23 nt, Artificial Sequence
  Description of Artificial Sequence: Synthetic oligonucleotide
aaacacccgaagauucauuauuu

SEQ ID NO: 491 - RNA, 23 nt, Artificial Sequence
  Description of Artificial Sequence: Synthetic oligonucleotide
aaaagggaaacacccgaagauuc

SEQ ID NO: 492 - RNA, 23 nt, Artificial Sequence
  Description of Artificial Sequence: Synthetic oligonucleotide
auuagcuaaagggaaacacccga

SEQ ID NO: 493 - RNA, 23 nt, Artificial Sequence
  Description of Artificial Sequence: Synthetic oligonucleotide
aaucugugcuuagcuaaagggaa

SEQ ID NO: 494 - RNA, 23 nt, Artificial Sequence
  Description of Artificial Sequence: Synthetic oligonucleotide
aagguagaucugugcuuagcuaa

SEQ ID NO: 495 - RNA, 23 nt, Artificial Sequence
  Description of Artificial Sequence: Synthetic oligonucleotide
aaaaucaccaagguagaucugug

SEQ ID NO: 496 - RNA, 23 nt, Artificial Sequence
  Description of Artificial Sequence: Synthetic oligonucleotide
aaggguccaaaucaccaagguag

SEQ ID NO: 497 - RNA, 23 nt, Artificial Sequence
  Description of Artificial Sequence: Synthetic oligonucleotide
aacaaagcaaccaggguccaaau

SEQ ID NO: 498 - RNA, 23 nt, Artificial Sequence
  Description of Artificial Sequence: Synthetic oligonucleotide
aacuagacacaaagcaaccaggg

SEQ ID NO: 499 - RNA, 23 nt, Artificial Sequence
  Description of Artificial Sequence: Synthetic oligonucleotide
auagaaaacuagacacaaagcaa

SEQ ID NO: 500 - RNA, 23 nt, Artificial Sequence
  Description of Artificial Sequence: Synthetic oligonucleotide
augaagggucuagaaaacuagac

SEQ ID NO: 501 - RNA, 23 nt, Artificial Sequence
  Description of Artificial Sequence: Synthetic oligonucleotide
aaagagaugaagggucuagaaaa

SEQ ID NO: 502 - RNA, 23 nt, Artificial Sequence
  Description of Artificial Sequence: Synthetic oligonucleotide
aucaaguaagagaugaagggucu

SEQ ID NO: 503 - RNA, 23 nt, Artificial Sequence
  Description of Artificial Sequence: Synthetic oligonucleotide
aaagucuaucaaguaagagauga

SEQ ID NO: 504 - RNA, 23 nt, Artificial Sequence
  Description of Artificial Sequence: Synthetic oligonucleotide
aauuaguaagucuaucaaguaag

SEQ ID NO: 505 - RNA, 23 nt, Artificial Sequence
  Description of Artificial Sequence: Synthetic oligonucleotide
acuucacauuuuauuaguaaguc

SEQ ID NO: 506 - RNA, 23 nt, Artificial Sequence
  Description of Artificial Sequence: Synthetic oligonucleotide
auggucuagucuucacauuuuau

SEQ ID NO: 507 - RNA, 23 nt, Artificial Sequence
  Description of Artificial Sequence: Synthetic oligonucleotide
agacaauuggucuagucuucaca

SEQ ID NO: 508 - RNA, 23 nt, Artificial Sequence
  Description of Artificial Sequence: Synthetic oligonucleotide
acaagcaugacaauuggucuagu

SEQ ID NO: 509 - RNA, 23 nt, Artificial Sequence
  Description of Artificial Sequence: Synthetic oligonucleotide
aagcaguugugucaagcaugaca

SEQ ID NO: 510 - RNA, 23 nt, Artificial Sequence
  Description of Artificial Sequence: Synthetic oligonucleotide
aagccacagcaguugugucaagc

SEQ ID NO: 511 - RNA, 23 nt, Artificial Sequence
  Description of Artificial Sequence: Synthetic oligonucleotide
aaaagcaccaaccagccacagca

SEQ ID NO: 512 - RNA, 23 nt, Artificial Sequence
  Description of Artificial Sequence: Synthetic oligonucleotide
aauaaacaaagcaccaaccagcc

SEQ ID NO: 513 - RNA, 23 nt, Artificial Sequence
  Description of Artificial Sequence: Synthetic oligonucleotide
aacuaccauaaacaaagcaccaa

SEQ ID NO: 514 - RNA, 23 nt, Artificial Sequence
  Description of Artificial Sequence: Synthetic oligonucleotide
aaaaacuacuaccauaaacaaag

SEQ ID NO: 515 - RNA, 23 nt, Artificial Sequence
  Description of Artificial Sequence: Synthetic oligonucleotide
auuacagaaaaacuacuaccaua

SEQ ID NO: 516 - RNA, 23 nt, Artificial Sequence
  Description of Artificial Sequence: Synthetic oligonucleotide
aucuguguuacagaaaaacuacu

SEQ ID NO: 517 - RNA, 23 nt, Artificial Sequence
  Description of Artificial Sequence: Synthetic oligonucleotide
acuauauucuguguuacagaaaa

SEQ ID NO: 518 - RNA, 23 nt, Artificial Sequence
  Description of Artificial Sequence: Synthetic oligonucleotide
auucuuauccuauauucuguguu

SEQ ID NO: 519 - RNA, 23 nt, Artificial Sequence
  Description of Artificial Sequence: Synthetic oligonucleotide
aaagucaagguacuuuauucuua

SEQ ID NO: 520 - RNA, 23 nt, Artificial Sequence
  Description of Artificial Sequence: Synthetic oligonucleotide
aaugcugugaacaaagucaaggu

SEQ ID NO: 521 - RNA, 23 nt, Artificial Sequence
  Description of Artificial Sequence: Synthetic oligonucleotide
acccuacaugcugugaacaaagu

SEQ ID NO: 522 - RNA, 23 nt, Artificial Sequence
  Description of Artificial Sequence: Synthetic oligonucleotide
aucaucacccuacaugcugugaa

SEQ ID NO: 523 - RNA, 23 nt, Artificial Sequence
  Description of Artificial Sequence: Synthetic oligonucleotide
augugagugcucaucacccuaca

SEQ ID NO: 524 - RNA, 23 nt, Artificial Sequence
  Description of Artificial Sequence: Synthetic oligonucleotide
aaacaauugugagugcucaucac

SEQ ID NO: 525 - RNA, 23 nt, Artificial Sequence
  Description of Artificial Sequence: Synthetic oligonucleotide
auuuagucaacaauugugagugc

SEQ ID NO: 526 - RNA, 23 nt, Artificial Sequence
  Description of Artificial Sequence: Synthetic oligonucleotide
aaaaagcagcauuuuagucaaca

SEQ ID NO: 527 - RNA, 23 nt, Artificial Sequence
  Description of Artificial Sequence: Synthetic oligonucleotide
acuauguuuuaaaagcagcauuu

SEQ ID NO: 528 - RNA, 23 nt, Artificial Sequence
  Description of Artificial Sequence: Synthetic oligonucleotide
aacuuuccuauguuuuaaaagca

SEQ ID NO: 529 - RNA, 23 nt, Artificial Sequence
  Description of Artificial Sequence: Synthetic oligonucleotide
aaaccauucuacuuuccuauguu

SEQ ID NO: 530 - RNA, 23 nt, Artificial Sequence
  Description of Artificial Sequence: Synthetic oligonucleotide
auugcacucaaccauucuacuuu

SEQ ID NO: 531 - RNA, 23 nt, Artificial Sequence
  Description of Artificial Sequence: Synthetic oligonucleotide
aauggauuugcacucaaccauuc

SEQ ID NO: 532 - RNA, 23 nt, Artificial Sequence
  Description of Artificial Sequence: Synthetic oligonucleotide
auugugcuauggauuugcacuca

SEQ ID NO: 533 - RNA, 23 nt, Artificial Sequence
  Description of Artificial Sequence: Synthetic oligonucleotide
aaauuuaucuugugcuauggauu

SEQ ID NO: 534 - RNA, 23 nt, Artificial Sequence
  Description of Artificial Sequence: Synthetic oligonucleotide
aaacuagcucaauuuaucuugug

SEQ ID NO: 535 - RNA, 23 nt, Artificial Sequence
  Description of Artificial Sequence: Synthetic oligonucleotide
augauuugccuuaacuagcucaa

SEQ ID NO: 536 - RNA, 23 nt, Artificial Sequence
  Description of Artificial Sequence: Synthetic oligonucleotide
aauuuuaccugauuugccuuaac

SEQ ID NO: 537 - RNA, 23 nt, Artificial Sequence
  Description of Artificial Sequence: Synthetic oligonucleotide
agaaucaugacuauuuuaccuga

SEQ ID NO: 538 - RNA, 23 nt, Artificial Sequence
  Description of Artificial Sequence: Synthetic oligonucleotide
aacauuacauagaaucaugacua

SEQ ID NO: 539 - RNA, 23 nt, Artificial Sequence
  Description of Artificial Sequence: Synthetic oligonucleotide
auuucugguuuacauuacauaga

SEQ ID NO: 540 - RNA, 23 nt, Artificial Sequence
  Description of Artificial Sequence: Synthetic oligonucleotide
aauaacaucuugaaaucaugaac

SEQ ID NO: 541 - RNA, 23 nt, Artificial Sequence
  Description of Artificial Sequence: Synthetic oligonucleotide
aauaucucuguaauucaaaaguc

SEQ ID NO: 542 - RNA, 23 nt, Artificial Sequence
  Description of Artificial Sequence: Synthetic oligonucleotide
aacucuguaucacaacucuaauu

SEQ ID NO: 543 - RNA, 23 nt, Artificial Sequence
  Description of Artificial Sequence: Synthetic oligonucleotide
aaaauauacucuguaucacaacu

SEQ ID NO: 544 - RNA, 23 nt, Artificial Sequence
  Description of Artificial Sequence: Synthetic oligonucleotide
agaauggaaauauacucuguauc

SEQ ID NO: 545 - RNA, 23 nt, Artificial Sequence
  Description of Artificial Sequence: Synthetic oligonucleotide
auauugucugaauggaaauauac

SEQ ID NO: 546 - RNA, 23 nt, Artificial Sequence
  Description of Artificial Sequence: Synthetic oligonucleotide
aguuaugauauauugucugaaug

SEQ ID NO: 547 - RNA, 21 nt, Artificial Sequence
  Description of Artificial Sequence: Synthetic oligonucleotide
agaucggugccgauuccugca

SEQ ID NO: 548 - RNA, 21 nt, Artificial Sequence
  Description of Artificial Sequence: Synthetic oligonucleotide
cgcgaccaugucccaucacua

SEQ ID NO: 549 - RNA, 21 nt, Artificial Sequence
  Description of Artificial Sequence: Synthetic oligonucleotide
guacggcaaacacaacggaca

SEQ ID NO: 550 - RNA, 21 nt, Artificial Sequence
  Description of Artificial Sequence: Synthetic oligonucleotide
caaacacaacggaccugagca

SEQ ID NO: 551 - RNA, 21 nt, Artificial Sequence
  Description of Artificial Sequence: Synthetic oligonucleotide
ggaccugagcacuggcauaaa

SEQ ID NO: 552 - RNA, 21 nt, Artificial Sequence
  Description of Artificial Sequence: Synthetic oligonucleotide
gagcacuggcauaaggacuua

SEQ ID NO: 553 - RNA, 21 nt, Artificial Sequence
  Description of Artificial Sequence: Synthetic oligonucleotide
guugacaucgacacucauaca

SEQ ID NO: 554 - RNA, 21 nt, Artificial Sequence
  Description of Artificial Sequence: Synthetic oligonucleotide
acacucauacagccaaguaua

SEQ ID NO: 555 - RNA, 21 nt, Artificial Sequence
  Description of Artificial Sequence: Synthetic oligonucleotide
uacagccaaguaugacccuua

SEQ ID NO: 556 - RNA, 21 nt, Artificial Sequence
  Description of Artificial Sequence: Synthetic oligonucleotide
caaguaugacccuucccugaa

SEQ ID NO: 557 - RNA, 21 nt, Artificial Sequence
  Description of Artificial Sequence: Synthetic oligonucleotide
ugucuguuuccuaugaucaaa

SEQ ID NO: 558 - RNA, 21 nt, Artificial Sequence
  Description of Artificial Sequence: Synthetic oligonucleotide
ccuaugaucaagcaacuucca

SEQ ID NO: 559 - RNA, 21 nt, Artificial Sequence
  Description of Artificial Sequence: Synthetic oligonucleotide
caagcaacuucccugaggaua

SEQ ID NO: 560 - RNA, 21 nt, Artificial Sequence
  Description of Artificial Sequence: Synthetic oligonucleotide
cccugaggauccucaacaaua

SEQ ID NO: 561 - RNA, 21 nt, Artificial Sequence
  Description of Artificial Sequence: Synthetic oligonucleotide
uccucaacaauggucaugcua

SEQ ID NO: 562 - RNA, 21 nt, Artificial Sequence
  Description of Artificial Sequence: Synthetic oligonucleotide
acaauggucaugcuuucaaca

SEQ ID NO: 563 - RNA, 21 nt, Artificial Sequence
  Description of Artificial Sequence: Synthetic oligonucleotide
augcuuucaacguggaguuua

SEQ ID NO: 564 - RNA, 21 nt, Artificial Sequence
  Description of Artificial Sequence: Synthetic oligonucleotide
aacguggaguuugaugacuca

SEQ ID NO: 565 - RNA, 21 nt, Artificial Sequence
  Description of Artificial Sequence: Synthetic oligonucleotide
ugaugacucucaggacaaaga

SEQ ID NO: 566 - RNA, 21 nt, Artificial Sequence
  Description of Artificial Sequence: Synthetic oligonucleotide
ucucaggacaaagcagugcua

SEQ ID NO: 567 - RNA, 21 nt, Artificial Sequence
  Description of Artificial Sequence: Synthetic oligonucleotide
gacaaagcagugcucaaggga

SEQ ID NO: 568 - RNA, 21 nt, Artificial Sequence
  Description of Artificial Sequence: Synthetic oligonucleotide
uggcacuuacagauugauuca

SEQ ID NO: 569 - RNA, 21 nt, Artificial Sequence
  Description of Artificial Sequence: Synthetic oligonucleotide
uuacagauugauucaguuuca

SEQ ID NO: 570 - RNA, 21 nt, Artificial Sequence
  Description of Artificial Sequence: Synthetic oligonucleotide
auucaguuucacuuucacuga

SEQ ID NO: 571 - RNA, 21 nt, Artificial Sequence
  Description of Artificial Sequence: Synthetic oligonucleotide
ucacuugauggacaagguuca

SEQ ID NO: 572 - RNA, 21 nt, Artificial Sequence
  Description of Artificial Sequence: Synthetic oligonucleotide
gauggacaagguucagagcaa

SEQ ID NO: 573 - RNA, 21 nt, Artificial Sequence
  Description of Artificial Sequence: Synthetic oligonucleotide
caagguucagagcauacugua

SEQ ID NO: 574 - RNA, 21 nt, Artificial Sequence
  Description of Artificial Sequence: Synthetic oligonucleotide
ucagagcauacuguggauaaa

SEQ ID NO: 575 - RNA, 21 nt, Artificial Sequence
  Description of Artificial Sequence: Synthetic oligonucleotide
aagaaauaugcugcagaacua

SEQ ID NO: 576 - RNA, 21 nt, Artificial Sequence
  Description of Artificial Sequence: Synthetic oligonucleotide
uaugcugcagaacuucacuua

SEQ ID NO: 577 - RNA, 21 nt, Artificial Sequence
  Description of Artificial Sequence: Synthetic oligonucleotide
gcagaacuucacuugguucaa

SEQ ID NO: 578 - RNA, 21 nt, Artificial Sequence
  Description of Artificial Sequence: Synthetic oligonucleotide
cuucacuugguucacuggaaa

SEQ ID NO: 579 - RNA, 21 nt, Artificial Sequence
  Description of Artificial Sequence: Synthetic oligonucleotide
uuugggaaagcugugcagcaa

SEQ ID NO: 580 - RNA, 21 nt, Artificial Sequence
  Description of Artificial Sequence: Synthetic oligonucleotide
gugcagcaaccugauggacua

SEQ ID NO: 581 - RNA, 21 nt, Artificial Sequence
  Description of Artificial Sequence: Synthetic oligonucleotide
caaccugauggacuggccgua

SEQ ID NO: 582 - RNA, 21 nt, Artificial Sequence
  Description of Artificial Sequence: Synthetic oligonucleotide
cuggccguucuagguauuuua

SEQ ID NO: 583 - RNA, 21 nt, Artificial Sequence
  Description of Artificial Sequence: Synthetic oligonucleotide
ugaagguuggcagcgcuaaaa

SEQ ID NO: 584 - RNA, 21 nt, Artificial Sequence
  Description of Artificial Sequence: Synthetic oligonucleotide
gcagcgcuaaaccgggccuua

SEQ ID NO: 585 - RNA, 21 nt, Artificial Sequence
  Description of Artificial Sequence: Synthetic oligonucleotide
ccgggccuucagaaaguugua

SEQ ID NO: 586 - RNA, 21 nt, Artificial Sequence
  Description of Artificial Sequence: Synthetic oligonucleotide
cuucagaaaguuguugaugua

SEQ ID NO: 587 - RNA, 21 nt, Artificial Sequence
  Description of Artificial Sequence: Synthetic oligonucleotide
guuguugaugugcuggauuca

SEQ ID NO: 588 - RNA, 21 nt, Artificial Sequence
  Description of Artificial Sequence: Synthetic oligonucleotide
gcuggauuccauuaaaacaaa

SEQ ID NO: 589 - RNA, 21 nt, Artificial Sequence
  Description of Artificial Sequence: Synthetic oligonucleotide
uccauuaaaacaaagggcaaa

SEQ ID NO: 590 - RNA, 21 nt, Artificial Sequence
  Description of Artificial Sequence: Synthetic oligonucleotide
aaaacaaagggcaagagugca

SEQ ID NO: 591 - RNA, 21 nt, Artificial Sequence
  Description of Artificial Sequence: Synthetic oligonucleotide
ggcaagagugcugacuucaca

SEQ ID NO: 592 - RNA, 21 nt, Artificial Sequence
  Description of Artificial Sequence: Synthetic oligonucleotide
gugcugacuucacuaacuuca

SEQ ID NO: 593 - RNA, 21 nt, Artificial Sequence
  Description of Artificial Sequence: Synthetic oligonucleotide
acuucacuaacuucgauccua

SEQ ID NO: 594 - RNA, 21 nt, Artificial Sequence
  Description of Artificial Sequence: Synthetic oligonucleotide
cgauccucguggccuccuuca

SEQ ID NO: 595 - RNA, 21 nt, Artificial Sequence
  Description of Artificial Sequence: Synthetic oligonucleotide
ucguggccuccuuccugaaua

SEQ ID NO: 596 - RNA, 21 nt, Artificial Sequence
  Description of Artificial Sequence: Synthetic oligonucleotide
ccuccuuccugaauccuugga

SEQ ID NO: 597 - RNA, 21 nt, Artificial Sequence
  Description of Artificial Sequence: Synthetic oligonucleotide
ccugaauccuuggauuacuga

SEQ ID NO: 598 - RNA, 21 nt, Artificial Sequence
  Description of Artificial Sequence: Synthetic oligonucleotide
uccuuggauuacuggaccuaa

SEQ ID NO: 599 - RNA, 21 nt, Artificial Sequence
  Description of Artificial Sequence: Synthetic oligonucleotide
ccuacccaggcucacugacca

SEQ ID NO: 600 - RNA, 21 nt, Artificial Sequence
  Description of Artificial Sequence: Synthetic oligonucleotide
ccucuucuggaaugugugaca

SEQ ID NO: 601 - RNA, 21 nt, Artificial Sequence
  Description of Artificial Sequence: Synthetic oligonucleotide
uggaaugugugaccuggauua

SEQ ID NO: 602 - RNA, 21 nt, Artificial Sequence
  Description of Artificial Sequence: Synthetic oligonucleotide
ugugaccuggauugugcucaa

SEQ ID NO: 603 - RNA, 21 nt, Artificial Sequence
  Description of Artificial Sequence: Synthetic oligonucleotide
cuggauugugcucaaggaaca

SEQ ID NO: 604 - RNA, 21 nt, Artificial Sequence
  Description of Artificial Sequence: Synthetic oligonucleotide
cucaaggaacccaucagcgua

SEQ ID NO: 605 - RNA, 21 nt, Artificial Sequence
  Description of Artificial Sequence: Synthetic oligonucleotide
gaacccaucagcgucagcaga

SEQ ID NO: 606 - RNA, 21 nt, Artificial Sequence
  Description of Artificial Sequence: Synthetic oligonucleotide
agaacugaugguggacaacua

SEQ ID NO: 607 - RNA, 21 nt, Artificial Sequence
  Description of Artificial Sequence: Synthetic oligonucleotide
cgagcagguguugaaauucca

SEQ ID NO: 608 - RNA, 21 nt, Artificial Sequence
  Description of Artificial Sequence: Synthetic oligonucleotide
gguguugaaauuccguaaaca

SEQ ID NO: 609 - RNA, 21 nt, Artificial Sequence
  Description of Artificial Sequence: Synthetic oligonucleotide
gaaauuccguaaacuuaacua

SEQ ID NO: 610 - RNA, 21 nt, Artificial Sequence
  Description of Artificial Sequence: Synthetic oligonucleotide
ccguaaacuuaacuucaauga

SEQ ID NO: 611 - RNA, 21 nt, Artificial Sequence
  Description of Artificial Sequence: Synthetic oligonucleotide
gagggugaacccgaagaacua

SEQ ID NO: 612 - RNA, 21 nt, Artificial Sequence
  Description of Artificial Sequence: Synthetic oligonucleotide
gaacccgaagaacugauggua

SEQ ID NO: 613 - RNA, 21 nt, Artificial Sequence
  Description of Artificial Sequence: Synthetic oligonucleotide
augguggacaacuggcgccca

SEQ ID NO: 614 - RNA, 21 nt, Artificial Sequence
  Description of Artificial Sequence: Synthetic oligonucleotide
ccagcucagccacugaagaaa

SEQ ID NO: 615 - RNA, 21 nt, Artificial Sequence
  Description of Artificial Sequence: Synthetic oligonucleotide
cagccacugaagaacaggcaa

SEQ ID NO: 616 - RNA, 21 nt, Artificial Sequence
  Description of Artificial Sequence: Synthetic oligonucleotide
cugaagaacaggcaaaucaaa

SEQ ID NO: 617 - RNA, 21 nt, Artificial Sequence
  Description of Artificial Sequence: Synthetic oligonucleotide
ucacuggaacaccaaauauga

SEQ ID NO: 618 - RNA, 21 nt, Artificial Sequence
  Description of Artificial Sequence: Synthetic oligonucleotide
ggcaaaucaaagcuuccuuca

SEQ ID NO: 619 - RNA, 21 nt, Artificial Sequence
  Description of Artificial Sequence: Synthetic oligonucleotide
caaagcuuccuucaaauaaga

SEQ ID NO: 620 - RNA, 21 nt, Artificial Sequence
  Description of Artificial Sequence: Synthetic oligonucleotide
uuccuucaaauaagaugguca

SEQ ID NO: 621 - RNA, 21 nt, Artificial Sequence
  Description of Artificial Sequence: Synthetic oligonucleotide
auaagauggucccauagucua

SEQ ID NO: 622 - RNA, 21 nt, Artificial Sequence
  Description of Artificial Sequence: Synthetic oligonucleotide
uggucccauagucuguaucca

SEQ ID NO: 623 - RNA, 21 nt, Artificial Sequence
  Description of Artificial Sequence: Synthetic oligonucleotide
auagucuguauccaaauaaua

SEQ ID NO: 624 - RNA, 21 nt, Artificial Sequence
  Description of Artificial Sequence: Synthetic oligonucleotide
guauccaaauaaugaaucuua

SEQ ID NO: 625 - RNA, 21 nt, Artificial Sequence
  Description of Artificial Sequence: Synthetic oligonucleotide
auaaugaaucuucggguguua

SEQ ID NO: 626 - RNA, 21 nt, Artificial Sequence
  Description of Artificial Sequence: Synthetic oligonucleotide
aucuucggguguuucccuuua

SEQ ID NO: 627 - RNA, 21 nt, Artificial Sequence
  Description of Artificial Sequence: Synthetic oligonucleotide
ggguguuucccuuuagcuaaa

SEQ ID NO: 628 - RNA, 21 nt, Artificial Sequence
  Description of Artificial Sequence: Synthetic oligonucleotide
cccuuuagcuaagcacagaua

SEQ ID NO: 629 - RNA, 21 nt, Artificial Sequence
  Description of Artificial Sequence: Synthetic oligonucleotide
agcuaagcacagaucuaccua

SEQ ID NO: 630 - RNA, 21 nt, Artificial Sequence
  Description of Artificial Sequence: Synthetic oligonucleotide
cagaucuaccuuggugauuua

SEQ ID NO: 631 - RNA, 21 nt, Artificial Sequence
  Description of Artificial Sequence: Synthetic oligonucleotide
accuuggugauuuggacccua

SEQ ID NO: 632 - RNA, 21 nt, Artificial Sequence
  Description of Artificial Sequence: Synthetic oligonucleotide
uuggacccugguugcuuugua

SEQ ID NO: 633 - RNA, 21 nt, Artificial Sequence
  Description of Artificial Sequence: Synthetic oligonucleotide
cugguugcuuugugucuagua

SEQ ID NO: 634 - RNA, 21 nt, Artificial Sequence
  Description of Artificial Sequence: Synthetic oligonucleotide
gcuuugugucuaguuuucuaa

SEQ ID NO: 635 - RNA, 21 nt, Artificial Sequence
  Description of Artificial Sequence: Synthetic oligonucleotide
cuaguuuucuagacccuucaa

SEQ ID NO: 636 - RNA, 21 nt, Artificial Sequence
  Description of Artificial Sequence: Synthetic oligonucleotide
uucuagacccuucaucucuua

SEQ ID NO: 637 - RNA, 21 nt, Artificial Sequence
  Description of Artificial Sequence: Synthetic oligonucleotide
acccuucaucucuuacuugaa

SEQ ID NO: 638 - RNA, 21 nt, Artificial Sequence
  Description of Artificial Sequence: Synthetic oligonucleotide
aucucuuacuugauagacuua

SEQ ID NO: 639 - RNA, 21 nt, Artificial Sequence
  Description of Artificial Sequence: Synthetic oligonucleotide
uacuugauagacuuacuaaua

SEQ ID NO: 640 - RNA, 21 nt, Artificial Sequence
  Description of Artificial Sequence: Synthetic oligonucleotide
cuuacuaauaaaaugugaaga

SEQ ID NO: 641 - RNA, 21 nt, Artificial Sequence
  Description of Artificial Sequence: Synthetic oligonucleotide
aaaaugugaagacuagaccaa

SEQ ID NO: 642 - RNA, 21 nt, Artificial Sequence
  Description of Artificial Sequence: Synthetic oligonucleotide
ugaagacuagaccaauuguca

SEQ ID NO: 643 - RNA, 21 nt, Artificial Sequence
  Description of Artificial Sequence: Synthetic oligonucleotide
uagaccaauugucaugcuuga

SEQ ID NO: 644 - RNA, 21 nt, Artificial Sequence
  Description of Artificial Sequence: Synthetic oligonucleotide
ucaugcuugacacaacugcua

SEQ ID NO: 645 - RNA, 21 nt, Artificial Sequence
  Description of Artificial Sequence: Synthetic oligonucleotide
uugacacaacugcuguggcua

SEQ ID NO: 646 - RNA, 21 nt, Artificial Sequence
  Description of Artificial Sequence: Synthetic oligonucleotide
cuguggcugguuggugcuuua

SEQ ID NO: 647 - RNA, 21 nt, Artificial Sequence
  Description of Artificial Sequence: Synthetic oligonucleotide
cugguuggugcuuuguuuaua

SEQ ID NO: 648 - RNA, 21 nt, Artificial Sequence
  Description of Artificial Sequence: Synthetic oligonucleotide
ggugcuuuguuuaugguagua

SEQ ID NO: 649 - RNA, 21 nt, Artificial Sequence
  Description of Artificial Sequence: Synthetic oligonucleotide
uuguuuaugguaguaguuuua

SEQ ID NO: 650 - RNA, 21 nt, Artificial Sequence
  Description of Artificial Sequence: Synthetic oligonucleotide
ugguaguaguuuuucuguaaa

SEQ ID NO: 651 - RNA, 21 nt, Artificial Sequence
  Description of Artificial Sequence: Synthetic oligonucleotide
uaguuuuucuguaacacagaa

SEQ ID NO: 652 - RNA, 21 nt, Artificial Sequence
  Description of Artificial Sequence: Synthetic oligonucleotide
uucuguaacacagaauauaga

SEQ ID NO: 653 - RNA, 21 nt, Artificial Sequence
  Description of Artificial Sequence: Synthetic oligonucleotide
cacagaauauaggauaagaaa

SEQ ID NO: 654 - RNA, 21 nt, Artificial Sequence
  Description of Artificial Sequence: Synthetic oligonucleotide
agaauaaaguaccuugacuua

SEQ ID NO: 655 - RNA, 21 nt, Artificial Sequence
  Description of Artificial Sequence: Synthetic oligonucleotide
cuugacuuuguucacagcaua

SEQ ID NO: 656 - RNA, 21 nt, Artificial Sequence
  Description of Artificial Sequence: Synthetic oligonucleotide
uuuguucacagcauguaggga

SEQ ID NO: 657 - RNA, 21 nt, Artificial Sequence
  Description of Artificial Sequence: Synthetic oligonucleotide
cacagcauguagggugaugaa

SEQ ID NO: 658 - RNA, 21 nt, Artificial Sequence
  Description of Artificial Sequence: Synthetic oligonucleotide
uagggugaugagcacucacaa

SEQ ID NO: 659 - RNA, 21 nt, Artificial Sequence
  Description of Artificial Sequence: Synthetic oligonucleotide
gaugagcacucacaauuguua

SEQ ID NO: 660 - RNA, 21 nt, Artificial Sequence
  Description of Artificial Sequence: Synthetic oligonucleotide
acucacaauuguugacuaaaa

SEQ ID NO: 661 - RNA, 21 nt, Artificial Sequence
  Description of Artificial Sequence: Synthetic oligonucleotide
uugacuaaaaugcugcuuuua

SEQ ID NO: 662 - RNA, 21 nt, Artificial Sequence
  Description of Artificial Sequence: Synthetic oligonucleotide
augcugcuuuuaaaacauaga

SEQ ID NO: 663 - RNA, 21 nt, Artificial Sequence
  Description of Artificial Sequence: Synthetic oligonucleotide
cuuuuaaaacauaggaaagua

SEQ ID NO: 664 - RNA, 21 nt, Artificial Sequence
  Description of Artificial Sequence: Synthetic oligonucleotide
cauaggaaaguagaaugguua

SEQ ID NO: 665 - RNA, 21 nt, Artificial Sequence
  Description of Artificial Sequence: Synthetic oligonucleotide
aguagaaugguugagugcaaa

SEQ ID NO: 666 - RNA, 21 nt, Artificial Sequence
  Description of Artificial Sequence: Synthetic oligonucleotide
augguugagugcaaauccaua

SEQ ID NO: 667 - RNA, 21 nt, Artificial Sequence
  Description of Artificial Sequence: Synthetic oligonucleotide
agugcaaauccauagcacaaa

SEQ ID NO: 668 - RNA, 21 nt, Artificial Sequence
  Description of Artificial Sequence: Synthetic oligonucleotide
uccauagcacaagauaaauua

SEQ ID NO: 669 - RNA, 21 nt, Artificial Sequence
  Description of Artificial Sequence: Synthetic oligonucleotide
caagauaaauugagcuaguua

SEQ ID NO: 670 - RNA, 21 nt, Artificial Sequence
  Description of Artificial Sequence: Synthetic oligonucleotide
gagcuaguuaaggcaaaucaa

SEQ ID NO: 671 - RNA, 21 nt, Artificial Sequence
  Description of Artificial Sequence: Synthetic oligonucleotide
uaaggcaaaucagguaaaaua

SEQ ID NO: 672 - RNA, 21 nt, Artificial Sequence
  Description of Artificial Sequence: Synthetic oligonucleotide
agguaaaauagucaugauuca

SEQ ID NO: 673 - RNA, 21 nt, Artificial Sequence
  Description of Artificial Sequence: Synthetic oligonucleotide
gucaugauucuauguaaugua

SEQ ID NO: 674 - RNA, 21 nt, Artificial Sequence
  Description of Artificial Sequence: Synthetic oligonucleotide
uauguaauguaaaccagaaaa

SEQ ID NO: 675 - RNA, 21 nt, Artificial Sequence
  Description of Artificial Sequence: Synthetic oligonucleotide
ucaugauuucaagauguuaua

SEQ ID NO: 676 - RNA, 21 nt, Artificial Sequence
  Description of Artificial Sequence: Synthetic oligonucleotide
cuuuugaauuacagagauaua

SEQ ID NO: 677 - RNA, 21 nt, Artificial Sequence
  Description of Artificial Sequence: Synthetic oligonucleotide
uuagaguugugauacagagua

SEQ ID NO: 678 - RNA, 21 nt, Artificial Sequence
  Description of Artificial Sequence: Synthetic oligonucleotide
uacagaguauauuuccauuca

SEQ ID NO: 679 - RNA, 21 nt, Artificial Sequence
  Description of Artificial Sequence: Synthetic oligonucleotide
auauuuccauucagacaauaa

SEQ ID NO: 680 - RNA, 21 nt, Artificial Sequence
  Description of Artificial Sequence: Synthetic oligonucleotide
uucagacaauauaucauaaca

SEQ ID NO: 681 - RNA, 21 nt, Artificial Sequence
  Description of Artificial Sequence: Synthetic oligonucleotide
uugugauacagaguauauuua

SEQ ID NO: 682 - RNA, 23 nt, Artificial Sequence
  Description of Artificial Sequence: Synthetic oligonucleotide
ugcaggaaucggcaccgaucugg

SEQ ID NO: 683 - RNA, 23 nt, Artificial Sequence
  Description of Artificial Sequence: Synthetic oligonucleotide
uagugaugggacauggucgcgcu

SEQ ID NO: 684 - RNA, 23 nt, Artificial Sequence
  Description of Artificial Sequence: Synthetic oligonucleotide
uguccguuguguuugccguaccc

SEQ ID NO: 685 - RNA, 23 nt, Artificial Sequence
  Description of Artificial Sequence: Synthetic oligonucleotide
ugcucagguccguuguguuugcc

SEQ ID NO: 686 - RNA, 23 nt, Artificial Sequence
  Description of Artificial Sequence: Synthetic oligonucleotide
uuuaugccagugcucagguccgu

SEQ ID NO: 687 - RNA, 23 nt, Artificial Sequence
  Description of Artificial Sequence: Synthetic oligonucleotide
uaaguccuuaugccagugcucag

SEQ ID NO: 688 - RNA, 23 nt, Artificial Sequence
  Description of Artificial Sequence: Synthetic oligonucleotide
uguaugagugucgaugucaacag

SEQ ID NO: 689 - RNA, 23 nt, Artificial Sequence
  Description of Artificial Sequence: Synthetic oligonucleotide
uauacuuggcuguaugagugucg

SEQ ID NO: 690 - RNA, 23 nt, Artificial Sequence
  Description of Artificial Sequence: Synthetic oligonucleotide
uaagggucauacuuggcuguaug

SEQ ID NO: 691 - RNA, 23 nt, Artificial Sequence
  Description of Artificial Sequence: Synthetic oligonucleotide
uucagggaagggucauacuuggc

SEQ ID NO: 692 - RNA, 23 nt, Artificial Sequence
  Description of Artificial Sequence: Synthetic oligonucleotide
uuugaucauaggaaacagacagg

SEQ ID NO: 693 - RNA, 23 nt, Artificial Sequence
  Description of Artificial Sequence: Synthetic oligonucleotide
uggaaguugcuugaucauaggaa

SEQ ID NO: 694 - RNA, 23 nt, Artificial Sequence
  Description of Artificial Sequence: Synthetic oligonucleotide
uauccucagggaaguugcuugau

SEQ ID NO: 695 - RNA, 23 nt, Artificial Sequence
  Description of Artificial Sequence: Synthetic oligonucleotide
uauuguugaggauccucagggaa

SEQ ID NO: 696 - RNA, 23 nt, Artificial Sequence
  Description of Artificial Sequence: Synthetic oligonucleotide
uagcaugaccauuguugaggauc

SEQ ID NO: 697 - RNA, 23 nt, Artificial Sequence
  Description of Artificial Sequence: Synthetic oligonucleotide
uguugaaagcaugaccauuguug

SEQ ID NO: 698 - RNA, 23 nt, Artificial Sequence
  Description of Artificial Sequence: Synthetic oligonucleotide
uaaacuccacguugaaagcauga

SEQ ID NO: 699 - RNA, 23 nt, Artificial Sequence
  Description of Artificial Sequence: Synthetic oligonucleotide
ugagucaucaaacuccacguuga

SEQ ID NO: 700 - RNA, 23 nt, Artificial Sequence
  Description of Artificial Sequence: Synthetic oligonucleotide
ucuuuguccugagagucaucaaa

SEQ ID NO: 701 - RNA, 23 nt, Artificial Sequence
  Description of Artificial Sequence: Synthetic oligonucleotide
uagcacugcuuuguccugagagu

SEQ ID NO: 702 - RNA, 23 nt, Artificial Sequence
  Description of Artificial Sequence: Synthetic oligonucleotide
ucccuugagcacugcuuuguccu

SEQ ID NO: 703 - RNA, 23 nt, Artificial Sequence
  Description of Artificial Sequence: Synthetic oligonucleotide
ugaaucaaucuguaagugccauc

SEQ ID NO: 704 - RNA, 23 nt, Artificial Sequence
  Description of Artificial Sequence: Synthetic oligonucleotide
ugaaacugaaucaaucuguaagu

SEQ ID NO: 705 - RNA, 23 nt, Artificial Sequence
  Description of Artificial Sequence: Synthetic oligonucleotide
ucagugaaagugaaacugaauca

SEQ ID NO: 706 - RNA, 23 nt, Artificial Sequence
  Description of Artificial Sequence: Synthetic oligonucleotide
ugaaccuuguccaucaagugaac

SEQ ID NO: 707 - RNA, 23 nt, Artificial Sequence
  Description of Artificial Sequence: Synthetic oligonucleotide
uugcucugaaccuuguccaucaa

SEQ ID NO: 708 - RNA, 23 nt, Artificial Sequence
  Description of Artificial Sequence: Synthetic oligonucleotide
uacaguaugcucugaaccuuguc

SEQ ID NO: 709 - RNA, 23 nt, Artificial Sequence
  Description of Artificial Sequence: Synthetic oligonucleotide
uuuauccacaguaugcucugaac

SEQ ID NO: 710 - RNA, 23 nt, Artificial Sequence
  Description of Artificial Sequence: Synthetic oligonucleotide
uaguucugcagcauauuucuuuu

SEQ ID NO: 711 - RNA, 23 nt, Artificial Sequence
  Description of Artificial Sequence: Synthetic oligonucleotide
uaagugaaguucugcagcauauu

SEQ ID NO: 712 - RNA, 23 nt, Artificial Sequence
  Description of Artificial Sequence: Synthetic oligonucleotide
uugaaccaagugaaguucugcag

SEQ ID NO: 713 - RNA, 23 nt, Artificial Sequence
  Description of Artificial Sequence: Synthetic oligonucleotide
uuuccagugaaccaagugaaguu

SEQ ID NO: 714 - RNA, 23 nt, Artificial Sequence
  Description of Artificial Sequence: Synthetic oligonucleotide
uugcugcacagcuuucccaaaau

SEQ ID NO: 715 - RNA, 23 nt, Artificial Sequence
  Description of Artificial Sequence: Synthetic oligonucleotide
uaguccaucagguugcugcacag

SEQ ID NO: 716 - RNA, 23 nt, Artificial Sequence
  Description of Artificial Sequence: Synthetic oligonucleotide
uacggccaguccaucagguugcu

SEQ ID NO: 717 - RNA, 23 nt, Artificial Sequence
  Description of Artificial Sequence: Synthetic oligonucleotide
uaaaauaccuagaacggccaguc

SEQ ID NO: 718 - RNA, 23 nt, Artificial Sequence
  Description of Artificial Sequence: Synthetic oligonucleotide
uuuuagcgcugccaaccuucaaa

SEQ ID NO: 719 - RNA, 23 nt, Artificial Sequence
  Description of Artificial Sequence: Synthetic oligonucleotide
uaaggcccgguuuagcgcugcca

SEQ ID NO: 720 - RNA, 23 nt, Artificial Sequence
  Description of Artificial Sequence: Synthetic oligonucleotide
uacaacuuucugaaggcccgguu

SEQ ID NO: 721 - RNA, 23 nt, Artificial Sequence
  Description of Artificial Sequence: Synthetic oligonucleotide
uacaucaacaacuuucugaaggc

SEQ ID NO: 722 - RNA, 23 nt, Artificial Sequence
  Description of Artificial Sequence: Synthetic oligonucleotide
ugaauccagcacaucaacaacuu

SEQ ID NO: 723 - RNA, 23 nt, Artificial Sequence
  Description of Artificial Sequence: Synthetic oligonucleotide
uuuguuuuaauggaauccagcac

SEQ ID NO: 724 - RNA, 23 nt, Artificial Sequence
  Description of Artificial Sequence: Synthetic oligonucleotide
uuugcccuuuguuuuaauggaau

SEQ ID NO: 725 - RNA, 23 nt, Artificial Sequence
  Description of Artificial Sequence: Synthetic oligonucleotide
ugcacucuugcccuuuguuuuaa

SEQ ID NO: 726 - RNA, 23 nt, Artificial Sequence
  Description of Artificial Sequence: Synthetic oligonucleotide
ugugaagucagcacucuugcccu

SEQ ID NO: 727 - RNA, 23 nt, Artificial Sequence
  Description of Artificial Sequence: Synthetic oligonucleotide
ugaaguuagugaagucagcacuc

SEQ ID NO: 728 - RNA, 23 nt, Artificial Sequence
  Description of Artificial Sequence: Synthetic oligonucleotide
uaggaucgaaguuagugaaguca

SEQ ID NO: 729 - RNA, 23 nt, Artificial Sequence
  Description of Artificial Sequence: Synthetic oligonucleotide
ugaaggaggccacgaggaucgaa

SEQ ID NO: 730 - RNA, 23 nt, Artificial Sequence
  Description of Artificial Sequence: Synthetic oligonucleotide
uauucaggaaggaggccacgagg

SEQ ID NO: 731 - RNA, 23 nt, Artificial Sequence
  Description of Artificial Sequence: Synthetic oligonucleotide
uccaaggauucaggaaggaggcc

SEQ ID NO: 732 - RNA, 23 nt, Artificial Sequence
  Description of Artificial Sequence: Synthetic oligonucleotide
ucaguaauccaaggauucaggaa

SEQ ID NO: 733 - RNA, 23 nt, Artificial Sequence
  Description of Artificial Sequence: Synthetic oligonucleotide
uuagguccaguaauccaaggauu

SEQ ID NO: 734 - RNA, 23 nt, Artificial Sequence
  Description of Artificial Sequence: Synthetic oligonucleotide
uggucagugagccuggguagguc

SEQ ID NO: 735 - RNA, 23 nt, Artificial Sequence
  Description of Artificial Sequence: Synthetic oligonucleotide
ugucacacauuccagaagaggag

SEQ ID NO: 736 - RNA, 23 nt, Artificial Sequence
  Description of Artificial Sequence: Synthetic oligonucleotide
uaauccaggucacacauuccaga

SEQ ID NO: 737 - RNA, 23 nt, Artificial Sequence
  Description of Artificial Sequence: Synthetic oligonucleotide
uugagcacaauccaggucacaca

SEQ ID NO: 738 - RNA, 23 nt, Artificial Sequence
  Description of Artificial Sequence: Synthetic oligonucleotide
uguuccuugagcacaauccaggu

SEQ ID NO: 739 - RNA, 23 nt, Artificial Sequence
  Description of Artificial Sequence: Synthetic oligonucleotide
uacgcugauggguuccuugagca

SEQ ID NO: 740 - RNA, 23 nt, Artificial Sequence
  Description of Artificial Sequence: Synthetic oligonucleotide
ucugcugacgcugauggguuccu

SEQ ID NO: 741 - RNA, 23 nt, Artificial Sequence
  Description of Artificial Sequence: Synthetic oligonucleotide
uaguuguccaccaucaguucuuc

SEQ ID NO: 742 - RNA, 23 nt, Artificial Sequence
  Description of Artificial Sequence: Synthetic oligonucleotide
uggaauuucaacaccugcucgcu

SEQ ID NO: 743 - RNA, 23 nt, Artificial Sequence
  Description of Artificial Sequence: Synthetic oligonucleotide
uguuuacggaauuucaacaccug

SEQ ID NO: 744 - RNA, 23 nt, Artificial Sequence
  Description of Artificial Sequence: Synthetic oligonucleotide
uaguuaaguuuacggaauuucaa

SEQ ID NO: 745 - RNA, 23 nt, Artificial Sequence
  Description of Artificial Sequence: Synthetic oligonucleotide
ucauugaaguuaaguuuacggaa

SEQ ID NO: 746 - RNA, 23 nt, Artificial Sequence
  Description of Artificial Sequence: Synthetic oligonucleotide
uaguucuucggguucacccuccc

SEQ ID NO: 747 - RNA, 23 nt, Artificial Sequence
  Description of Artificial Sequence: Synthetic oligonucleotide
uaccaucaguucuucggguucac

SEQ ID NO: 748 - RNA, 23 nt, Artificial Sequence
  Description of Artificial Sequence: Synthetic oligonucleotide
ugggcgccaguuguccaccauca

SEQ ID NO: 749 - RNA, 23 nt, Artificial Sequence
  Description of Artificial Sequence: Synthetic oligonucleotide
uuucuucaguggcugagcugggc

SEQ ID NO: 750 - RNA, 23 nt, Artificial Sequence
  Description of Artificial Sequence: Synthetic oligonucleotide
uugccuguucuucaguggcugag

SEQ ID NO: 751 - RNA, 23 nt, Artificial Sequence
  Description of Artificial Sequence: Synthetic oligonucleotide
uuugauuugccuguucuucagug

SEQ ID NO: 752 - RNA, 23 nt, Artificial Sequence
  Description of Artificial Sequence: Synthetic oligonucleotide
ucauauuugguguuccagugaac

SEQ ID NO: 753 - RNA, 23 nt, Artificial Sequence
  Description of Artificial Sequence: Synthetic oligonucleotide
ugaaggaagcuuugauuugccug

SEQ ID NO: 754 - RNA, 23 nt, Artificial Sequence
  Description of Artificial Sequence: Synthetic oligonucleotide
ucuuauuugaaggaagcuuugau

SEQ ID NO: 755 - RNA, 23 nt, Artificial Sequence
  Description of Artificial Sequence: Synthetic oligonucleotide
ugaccaucuuauuugaaggaagc

SEQ ID NO: 756 - RNA, 23 nt, Artificial Sequence
  Description of Artificial Sequence: Synthetic oligonucleotide
uagacuaugggaccaucuuauuu

SEQ ID NO: 757 - RNA, 23 nt, Artificial Sequence
  Description of Artificial Sequence: Synthetic oligonucleotide
uggauacagacuaugggaccauc

SEQ ID NO: 758 - RNA, 23 nt, Artificial Sequence
  Description of Artificial Sequence: Synthetic oligonucleotide
uauuauuuggauacagacuaugg

SEQ ID NO: 759 - RNA, 23 nt, Artificial Sequence
  Description of Artificial Sequence: Synthetic oligonucleotide
uaagauucauuauuuggauacag

SEQ ID NO: 760 - RNA, 23 nt, Artificial Sequence
  Description of Artificial Sequence: Synthetic oligonucleotide
uaacacccgaagauucauuauuu

SEQ ID NO: 761 - RNA, 23 nt, Artificial Sequence
  Description of Artificial Sequence: Synthetic oligonucleotide
uaaagggaaacacccgaagauuc

SEQ ID NO: 762 - RNA, 23 nt, Artificial Sequence
  Description of Artificial Sequence: Synthetic oligonucleotide
uuuagcuaaagggaaacacccga

SEQ ID NO: 763 - RNA, 23 nt, Artificial Sequence
  Description of Artificial Sequence: Synthetic oligonucleotide
uaucugugcuuagcuaaagggaa

SEQ ID NO: 764 - RNA, 23 nt, Artificial Sequence
  Description of Artificial Sequence: Synthetic oligonucleotide
uagguagaucugugcuuagcuaa

SEQ ID NO: 765 - RNA, 23 nt, Artificial Sequence
  Description of Artificial Sequence: Synthetic oligonucleotide
uaaaucaccaagguagaucugug

SEQ ID NO: 766 - RNA, 23 nt, Artificial Sequence
  Description of Artificial Sequence: Synthetic oligonucleotide
uaggguccaaaucaccaagguag

SEQ ID NO: 767 - RNA, 23 nt, Artificial Sequence
  Description of Artificial Sequence: Synthetic oligonucleotide
uacaaagcaaccaggguccaaau

SEQ ID NO: 768 - RNA, 23 nt, Artificial Sequence
  Description of Artificial Sequence: Synthetic oligonucleotide
uacuagacacaaagcaaccaggg

SEQ ID NO: 769 - RNA, 23 nt, Artificial Sequence
  Description of Artificial Sequence: Synthetic oligonucleotide
uuagaaaacuagacacaaagcaa

SEQ ID NO: 770 - RNA, 23 nt, Artificial Sequence
  Description of Artificial Sequence: Synthetic oligonucleotide
uugaagggucuagaaaacuagac

SEQ ID NO: 771 - RNA, 23 nt, Artificial Sequence
  Description of Artificial Sequence: Synthetic oligonucleotide
uaagagaugaagggucuagaaaa

SEQ ID NO: 772 - RNA, 23 nt, Artificial Sequence
  Description of Artificial Sequence: Synthetic oligonucleotide
uucaaguaagagaugaagggucu

SEQ ID NO: 773 - RNA, 23 nt, Artificial Sequence
  Description of Artificial Sequence: Synthetic oligonucleotide
uaagucuaucaaguaagagauga

SEQ ID NO: 774 - RNA, 23 nt, Artificial Sequence
  Description of Artificial Sequence: Synthetic oligonucleotide
uauuaguaagucuaucaaguaag

SEQ ID NO: 775 - RNA, 23 nt, Artificial Sequence
  Description of Artificial Sequence: Synthetic oligonucleotide
ucuucacauuuuauuaguaaguc

SEQ ID NO: 776 - RNA, 23 nt, Artificial Sequence
  Description of Artificial Sequence: Synthetic oligonucleotide
uuggucuagucuucacauuuuau

SEQ ID NO: 777 - RNA, 23 nt, Artificial Sequence
  Description of Artificial Sequence: Synthetic oligonucleotide
ugacaauuggucuagucuucaca

SEQ ID NO: 778 - RNA, 23 nt, Artificial Sequence
  Description of Artificial Sequence: Synthetic oligonucleotide
ucaagcaugacaauuggucuagu

SEQ ID NO: 779 - RNA, 23 nt, Artificial Sequence
  Description of Artificial Sequence: Synthetic oligonucleotide
uagcaguugugucaagcaugaca

SEQ ID NO: 780 - RNA, 23 nt, Artificial Sequence
  Description of Artificial Sequence: Synthetic oligonucleotide
uagccacagcaguugugucaagc

SEQ ID NO: 781 - RNA, 23 nt, Artificial Sequence
  Description of Artificial Sequence: Synthetic oligonucleotide
uaaagcaccaaccagccacagca

SEQ ID NO: 782 - RNA, 23 nt, Artificial Sequence
  Description of Artificial Sequence: Synthetic oligonucleotide
uauaaacaaagcaccaaccagcc

SEQ ID NO: 783 - RNA, 23 nt, Artificial Sequence
  Description of Artificial Sequence: Synthetic oligonucleotide
uacuaccauaaacaaagcaccaa

SEQ ID NO: 784 - RNA, 23 nt, Artificial Sequence
  Description of Artificial Sequence: Synthetic oligonucleotide
uaaaacuacuaccauaaacaaag

SEQ ID NO: 785 - RNA, 23 nt, Artificial Sequence
  Description of Artificial Sequence: Synthetic oligonucleotide
uuuacagaaaaacuacuaccaua

SEQ ID NO: 786 - RNA, 23 nt, Artificial Sequence
  Description of Artificial Sequence: Synthetic oligonucleotide
uucuguguuacagaaaaacuacu

SEQ ID NO: 787 - RNA, 23 nt, Artificial Sequence
  Description of Artificial Sequence: Synthetic oligonucleotide
ucuauauucuguguuacagaaaa

SEQ ID NO: 788 - RNA, 23 nt, Artificial Sequence
  Description of Artificial Sequence: Synthetic oligonucleotide
uuucuuauccuauauucuguguu

SEQ ID NO: 789 - RNA, 23 nt, Artificial Sequence
  Description of Artificial Sequence: Synthetic oligonucleotide
uaagucaagguacuuuauucuua

SEQ ID NO: 790 - RNA, 23 nt, Artificial Sequence
  Description of Artificial Sequence: Synthetic oligonucleotide
uaugcugugaacaaagucaaggu

SEQ ID NO: 791 - RNA, 23 nt, Artificial Sequence
  Description of Artificial Sequence: Synthetic oligonucleotide
ucccuacaugcugugaacaaagu

SEQ ID NO: 792 - RNA, 23 nt, Artificial Sequence
  Description of Artificial Sequence: Synthetic oligonucleotide
uucaucacccuacaugcugugaa

SEQ ID NO: 793 - RNA, 23 nt, Artificial Sequence
  Description of Artificial Sequence: Synthetic oligonucleotide
uugugagugcucaucacccuaca

SEQ ID NO: 794 - RNA, 23 nt, Artificial Sequence
  Description of Artificial Sequence: Synthetic oligonucleotide
uaacaauugugagugcucaucac

SEQ ID NO: 795 - RNA, 23 nt, Artificial Sequence
  Description of Artificial Sequence: Synthetic oligonucleotide
uuuuagucaacaauugugagugc

SEQ ID NO: 796 - RNA, 23 nt, Artificial Sequence
  Description of Artificial Sequence: Synthetic oligonucleotide
uaaaagcagcauuuuagucaaca

SEQ ID NO: 797 - RNA, 23 nt, Artificial Sequence
  Description of Artificial Sequence: Synthetic oligonucleotide
ucuauguuuuaaaagcagcauuu

SEQ ID NO: 798 - RNA, 23 nt, Artificial Sequence
  Description of Artificial Sequence: Synthetic oligonucleotide
uacuuuccuauguuuuaaaagca

SEQ ID NO: 799 - RNA, 23 nt, Artificial Sequence
  Description of Artificial Sequence: Synthetic oligonucleotide
uaaccauucuacuuuccuauguu

SEQ ID NO: 800 - RNA, 23 nt, Artificial Sequence
  Description of Artificial Sequence: Synthetic oligonucleotide
uuugcacucaaccauucuacuuu

SEQ ID NO: 801 - RNA, 23 nt, Artificial Sequence
  Description of Artificial Sequence: Synthetic oligonucleotide
uauggauuugcacucaaccauuc

SEQ ID NO: 802 - RNA, 23 nt, Artificial Sequence
  Description of Artificial Sequence: Synthetic oligonucleotide
uuugugcuauggauuugcacuca

SEQ ID NO: 803 - RNA, 23 nt, Artificial Sequence
  Description of Artificial Sequence: Synthetic oligonucleotide
uaauuuaucuugugcuauggauu

SEQ ID NO: 804 - RNA, 23 nt, Artificial Sequence
  Description of Artificial Sequence: Synthetic oligonucleotide
uaacuagcucaauuuaucuugug

SEQ ID NO: 805 - RNA, 23 nt, Artificial Sequence
  Description of Artificial Sequence: Synthetic oligonucleotide
uugauuugccuuaacuagcucaa

SEQ ID NO: 806 - RNA, 23 nt, Artificial Sequence
  Description of Artificial Sequence: Synthetic oligonucleotide
uauuuuaccugauuugccuuaac

SEQ ID NO: 807 - RNA, 23 nt, Artificial Sequence
  Description of Artificial Sequence: Synthetic oligonucleotide
ugaaucaugacuauuuuaccuga

SEQ ID NO: 808 - RNA, 23 nt, Artificial Sequence
  Description of Artificial Sequence: Synthetic oligonucleotide
uacauuacauagaaucaugacua

SEQ ID NO: 809 - RNA, 23 nt, Artificial Sequence
  Description of Artificial Sequence: Synthetic oligonucleotide
uuuucugguuuacauuacauaga

SEQ ID NO: 810 - RNA, 23 nt, Artificial Sequence
  Description of Artificial Sequence: Synthetic oligonucleotide
uauaacaucuugaaaucaugaac

SEQ ID NO: 811 - RNA, 23 nt, Artificial Sequence
  Description of Artificial Sequence: Synthetic oligonucleotide
uauaucucuguaauucaaaaguc

SEQ ID NO: 812 - RNA, 23 nt, Artificial Sequence
  Description of Artificial Sequence: Synthetic oligonucleotide
uacucuguaucacaacucuaauu

SEQ ID NO: 813 - RNA, 23 nt, Artificial Sequence
  Description of Artificial Sequence: Synthetic oligonucleotide
ugaauggaaauauacucuguauc

SEQ ID NO: 814 - RNA, 23 nt, Artificial Sequence
  Description of Artificial Sequence: Synthetic oligonucleotide
uuauugucugaauggaaauauac

SEQ ID NO: 815 - RNA, 23 nt, Artificial Sequence
  Description of Artificial Sequence: Synthetic oligonucleotide
uguuaugauauauugucugaaug

SEQ ID NO: 816 - RNA, 23 nt, Artificial Sequence
  Description of Artificial Sequence: Synthetic oligonucleotide
uaaauauacucuguaucacaacu

SEQ ID NO: 817 - RNA, 23 nt, Artificial Sequence
  Description of Artificial Sequence: Synthetic oligonucleotide
ccagaucggugccgauuccugcc

SEQ ID NO: 818 - RNA, 23 nt, Artificial Sequence
  Description of Artificial Sequence: Synthetic oligonucleotide
agcgcgaccaugucccaucacug

SEQ ID NO: 819 - RNA, 23 nt, Artificial Sequence
  Description of Artificial Sequence: Synthetic oligonucleotide
ggguacggcaaacacaacggacc

SEQ ID NO: 820 - RNA, 23 nt, Artificial Sequence
  Description of Artificial Sequence: Synthetic oligonucleotide
ggcaaacacaacggaccugagca

SEQ ID NO: 821 - RNA, 23 nt, Artificial Sequence
  Description of Artificial Sequence: Synthetic oligonucleotide
acggaccugagcacuggcauaag

SEQ ID NO: 822 - RNA, 23 nt, Artificial Sequence
  Description of Artificial Sequence: Synthetic oligonucleotide
cugagcacuggcauaaggacuuc

SEQ ID NO: 823 - RNA, 23 nt, Artificial Sequence
  Description of Artificial Sequence: Synthetic oligonucleotide
cuguugacaucgacacucauaca

SEQ ID NO: 824 - RNA, 23 nt, Artificial Sequence
  Description of Artificial Sequence: Synthetic oligonucleotide
cgacacucauacagccaaguaug

SEQ ID NO: 825 - RNA, 23 nt, Artificial Sequence
  Description of Artificial Sequence: Synthetic oligonucleotide
cauacagccaaguaugacccuuc

SEQ ID NO: 826 - RNA, 23 nt, Artificial Sequence
  Description of Artificial Sequence: Synthetic oligonucleotide
gccaaguaugacccuucccugaa

SEQ ID NO: 827 - RNA, 23 nt, Artificial Sequence
  Description of Artificial Sequence: Synthetic oligonucleotide
ccugucuguuuccuaugaucaag

SEQ ID NO: 828 - RNA, 23 nt, Artificial Sequence
  Description of Artificial Sequence: Synthetic oligonucleotide
uuccuaugaucaagcaacuuccc

SEQ ID NO: 829 - RNA, 23 nt, Artificial Sequence
  Description of Artificial Sequence: Synthetic oligonucleotide
aucaagcaacuucccugaggauc

SEQ ID NO: 830 - RNA, 23 nt, Artificial Sequence
  Description of Artificial Sequence: Synthetic oligonucleotide
uucccugaggauccucaacaaug

SEQ ID NO: 831 - RNA, 23 nt, Artificial Sequence
  Description of Artificial Sequence: Synthetic oligonucleotide
gauccucaacaauggucaugcuu

SEQ ID NO: 832 - RNA, 23 nt, Artificial Sequence
  Description of Artificial Sequence: Synthetic oligonucleotide
caacaauggucaugcuuucaacg

SEQ ID NO: 833 - RNA, 23 nt, Artificial Sequence
  Description of Artificial Sequence: Synthetic oligonucleotide
ucaugcuuucaacguggaguuug

SEQ ID NO: 834 - RNA, 23 nt, Artificial Sequence
  Description of Artificial Sequence: Synthetic oligonucleotide
ucaacguggaguuugaugacucu

SEQ ID NO: 835 - RNA, 23 nt, Artificial Sequence
  Description of Artificial Sequence: Synthetic oligonucleotide
uuugaugacucucaggacaaagc

SEQ ID NO: 836 - RNA, 23 nt, Artificial Sequence
  Description of Artificial Sequence: Synthetic oligonucleotide
acucucaggacaaagcagugcuc

SEQ ID NO: 837 - RNA, 23 nt, Artificial Sequence
  Description of Artificial Sequence: Synthetic oligonucleotide
aggacaaagcagugcucaaggga

SEQ ID NO: 838 - RNA, 23 nt, Artificial Sequence
  Description of Artificial Sequence: Synthetic oligonucleotide
gauggcacuuacagauugauuca

SEQ ID NO: 839 - RNA, 23 nt, Artificial Sequence
  Description of Artificial Sequence: Synthetic oligonucleotide
acuuacagauugauucaguuuca

SEQ ID NO: 840 - RNA, 23 nt, Artificial Sequence
  Description of Artificial Sequence: Synthetic oligonucleotide
ugauucaguuucacuuucacugg

SEQ ID NO: 841 - RNA, 23 nt, Artificial Sequence
  Description of Artificial Sequence: Synthetic oligonucleotide
guucacuugauggacaagguuca

SEQ ID NO: 842 - RNA, 23 nt, Artificial Sequence
  Description of Artificial Sequence: Synthetic oligonucleotide
uugauggacaagguucagagcau

SEQ ID NO: 843 - RNA, 23 nt, Artificial Sequence
  Description of Artificial Sequence: Synthetic oligonucleotide
gacaagguucagagcauacugug

SEQ ID NO: 844 - RNA, 23 nt, Artificial Sequence
  Description of Artificial Sequence: Synthetic oligonucleotide
guucagagcauacuguggauaaa

SEQ ID NO: 845 - RNA, 23 nt, Artificial Sequence
  Description of Artificial Sequence: Synthetic oligonucleotide
aaaagaaauaugcugcagaacuu

SEQ ID NO: 846 - RNA, 23 nt, Artificial Sequence
  Description of Artificial Sequence: Synthetic oligonucleotide
aauaugcugcagaacuucacuug

SEQ ID NO: 847 - RNA, 23 nt, Artificial Sequence
  Description of Artificial Sequence: Synthetic oligonucleotide
cugcagaacuucacuugguucac

SEQ ID NO: 848 - RNA, 23 nt, Artificial Sequence
  Description of Artificial Sequence: Synthetic oligonucleotide
aacuucacuugguucacuggaac

SEQ ID NO: 849 - RNA, 23 nt, Artificial Sequence
  Description of Artificial Sequence: Synthetic oligonucleotide
auuuugggaaagcugugcagcaa

SEQ ID NO: 850 - RNA, 23 nt, Artificial Sequence
  Description of Artificial Sequence: Synthetic oligonucleotide
cugugcagcaaccugauggacug

SEQ ID NO: 851 - RNA, 23 nt, Artificial Sequence
  Description of Artificial Sequence: Synthetic oligonucleotide
agcaaccugauggacuggccguu

SEQ ID NO: 852 - RNA, 23 nt, Artificial Sequence
  Description of Artificial Sequence: Synthetic oligonucleotide
gacuggccguucuagguauuuuu

SEQ ID NO: 853 - RNA, 23 nt, Artificial Sequence
  Description of Artificial Sequence: Synthetic oligonucleotide
uuugaagguuggcagcgcuaaac

SEQ ID NO: 854 - RNA, 23 nt, Artificial Sequence
  Description of Artificial Sequence: Synthetic oligonucleotide
uggcagcgcuaaaccgggccuuc

SEQ ID NO: 855 - RNA, 23 nt, Artificial Sequence
  Description of Artificial Sequence: Synthetic oligonucleotide
aaccgggccuucagaaaguuguu

SEQ ID NO: 856 - RNA, 23 nt, Artificial Sequence
  Description of Artificial Sequence: Synthetic oligonucleotide
gccuucagaaaguuguugaugug

SEQ ID NO: 857 - RNA, 23 nt, Artificial Sequence
  Description of Artificial Sequence: Synthetic oligonucleotide
aaguuguugaugugcuggauucc

SEQ ID NO: 858 - RNA, 23 nt, Artificial Sequence
  Description of Artificial Sequence: Synthetic oligonucleotide
gugcuggauuccauuaaaacaaa

SEQ ID NO: 859 - RNA, 23 nt, Artificial Sequence
  Description of Artificial Sequence: Synthetic oligonucleotide
auuccauuaaaacaaagggcaag

SEQ ID NO: 860 - RNA, 23 nt, Artificial Sequence
  Description of Artificial Sequence: Synthetic oligonucleotide
uuaaaacaaagggcaagagugcu

SEQ ID NO: 861 - RNA, 23 nt, Artificial Sequence
  Description of Artificial Sequence: Synthetic oligonucleotide
agggcaagagugcugacuucacu

SEQ ID NO: 862 - RNA, 23 nt, Artificial Sequence
  Description of Artificial Sequence: Synthetic oligonucleotide
gagugcugacuucacuaacuucg

SEQ ID NO: 863 - RNA, 23 nt, Artificial Sequence
  Description of Artificial Sequence: Synthetic oligonucleotide
ugacuucacuaacuucgauccuc

SEQ ID NO: 864 - RNA, 23 nt, Artificial Sequence
  Description of Artificial Sequence: Synthetic oligonucleotide
uucgauccucguggccuccuucc

SEQ ID NO: 865 - RNA, 23 nt, Artificial Sequence
  Description of Artificial Sequence: Synthetic oligonucleotide
ccucguggccuccuuccugaauc

SEQ ID NO: 866 - RNA, 23 nt, Artificial Sequence
  Description of Artificial Sequence: Synthetic oligonucleotide
ggccuccuuccugaauccuugga

SEQ ID NO: 867 - RNA, 23 nt, Artificial Sequence
  Description of Artificial Sequence: Synthetic oligonucleotide
uuccugaauccuuggauuacugg

SEQ ID NO: 868 - RNA, 23 nt, Artificial Sequence
  Description of Artificial Sequence: Synthetic oligonucleotide
aauccuuggauuacuggaccuac

SEQ ID NO: 869 - RNA, 23 nt, Artificial Sequence
  Description of Artificial Sequence: Synthetic oligonucleotide
gaccuacccaggcucacugacca

SEQ ID NO: 870 - RNA, 23 nt, Artificial Sequence
  Description of Artificial Sequence: Synthetic oligonucleotide
cuccucuucuggaaugugugacc

SEQ ID NO: 871 - RNA, 23 nt, Artificial Sequence
  Description of Artificial Sequence: Synthetic oligonucleotide
ucuggaaugugugaccuggauug

SEQ ID NO: 872 - RNA, 23 nt, Artificial Sequence
  Description of Artificial Sequence: Synthetic oligonucleotide
ugugugaccuggauugugcucaa

SEQ ID NO: 873 - RNA, 23 nt, Artificial Sequence
  Description of Artificial Sequence: Synthetic oligonucleotide
accuggauugugcucaaggaacc

SEQ ID NO: 874 - RNA, 23 nt, Artificial Sequence
  Description of Artificial Sequence: Synthetic oligonucleotide
ugcucaaggaacccaucagcguc

SEQ ID NO: 875 - RNA, 23 nt, Artificial Sequence
  Description of Artificial Sequence: Synthetic oligonucleotide
aggaacccaucagcgucagcagc

SEQ ID NO: 876 - RNA, 23 nt, Artificial Sequence
  Description of Artificial Sequence: Synthetic oligonucleotide
gaagaacugaugguggacaacug

SEQ ID NO: 877 - RNA, 23 nt, Artificial Sequence
  Description of Artificial Sequence: Synthetic oligonucleotide
agcgagcagguguugaaauuccg

SEQ ID NO: 878 - RNA, 23 nt, Artificial Sequence
  Description of Artificial Sequence: Synthetic oligonucleotide
cagguguugaaauuccguaaacu

SEQ ID NO: 879 - RNA, 23 nt, Artificial Sequence
  Description of Artificial Sequence: Synthetic oligonucleotide
uugaaauuccguaaacuuaacuu

SEQ ID NO: 880 - RNA, 23 nt, Artificial Sequence
  Description of Artificial Sequence: Synthetic oligonucleotide
uuccguaaacuuaacuucaaugg

SEQ ID NO: 881 - RNA, 23 nt, Artificial Sequence
  Description of Artificial Sequence: Synthetic oligonucleotide
gggagggugaacccgaagaacug

SEQ ID NO: 882 - RNA, 23 nt, Artificial Sequence
  Description of Artificial Sequence: Synthetic oligonucleotide
gugaacccgaagaacugauggug

SEQ ID NO: 883 - RNA, 23 nt, Artificial Sequence
  Description of Artificial Sequence: Synthetic oligonucleotide
ugaugguggacaacuggcgccca

SEQ ID NO: 884 - RNA, 23 nt, Artificial Sequence
  Description of Artificial Sequence: Synthetic oligonucleotide
gcccagcucagccacugaagaac

SEQ ID NO: 885 - RNA, 23 nt, Artificial Sequence
  Description of Artificial Sequence: Synthetic oligonucleotide
cucagccacugaagaacaggcaa

SEQ ID NO: 886 - RNA, 23 nt, Artificial Sequence
  Description of Artificial Sequence: Synthetic oligonucleotide
cacugaagaacaggcaaaucaaa

SEQ ID NO: 887 - RNA, 23 nt, Artificial Sequence
  Description of Artificial Sequence: Synthetic oligonucleotide
guucacuggaacaccaaauaugg

SEQ ID NO: 888 - RNA, 23 nt, Artificial Sequence
  Description of Artificial Sequence: Synthetic oligonucleotide
caggcaaaucaaagcuuccuuca

SEQ ID NO: 889 - RNA, 23 nt, Artificial Sequence
  Description of Artificial Sequence: Synthetic oligonucleotide
aucaaagcuuccuucaaauaaga

SEQ ID NO: 890 - RNA, 23 nt, Artificial Sequence
  Description of Artificial Sequence: Synthetic oligonucleotide
gcuuccuucaaauaagauggucc

SEQ ID NO: 891 - RNA, 23 nt, Artificial Sequence
  Description of Artificial Sequence: Synthetic oligonucleotide
aaauaagauggucccauagucug

SEQ ID NO: 892 - RNA, 23 nt, Artificial Sequence
  Description of Artificial Sequence: Synthetic oligonucleotide
gauggucccauagucuguaucca

SEQ ID NO: 893 - RNA, 23 nt, Artificial Sequence
  Description of Artificial Sequence: Synthetic oligonucleotide
ccauagucuguauccaaauaaug

SEQ ID NO: 894 - RNA, 23 nt, Artificial Sequence
  Description of Artificial Sequence: Synthetic oligonucleotide
cuguauccaaauaaugaaucuuc

SEQ ID NO: 895 - RNA, 23 nt, Artificial Sequence
  Description of Artificial Sequence: Synthetic oligonucleotide
aaauaaugaaucuucggguguuu

SEQ ID NO: 896 - RNA, 23 nt, Artificial Sequence
  Description of Artificial Sequence: Synthetic oligonucleotide
gaaucuucggguguuucccuuua

SEQ ID NO: 897 - RNA, 23 nt, Artificial Sequence
  Description of Artificial Sequence: Synthetic oligonucleotide
ucggguguuucccuuuagcuaag

SEQ ID NO: 898 - RNA, 23 nt, Artificial Sequence
  Description of Artificial Sequence: Synthetic oligonucleotide
uucccuuuagcuaagcacagauc

SEQ ID NO: 899 - RNA, 23 nt, Artificial Sequence
  Description of Artificial Sequence: Synthetic oligonucleotide
uuagcuaagcacagaucuaccuu

SEQ ID NO: 900 - RNA, 23 nt, Artificial Sequence
  Description of Artificial Sequence: Synthetic oligonucleotide
cacagaucuaccuuggugauuug

SEQ ID NO: 901 - RNA, 23 nt, Artificial Sequence
  Description of Artificial Sequence: Synthetic oligonucleotide
cuaccuuggugauuuggacccug

SEQ ID NO: 902 - RNA, 23 nt, Artificial Sequence
  Description of Artificial Sequence: Synthetic oligonucleotide
auuuggacccugguugcuuugug

SEQ ID NO: 903 - RNA, 23 nt, Artificial Sequence
  Description of Artificial Sequence: Synthetic oligonucleotide
cccugguugcuuugugucuaguu

SEQ ID NO: 904 - RNA, 23 nt, Artificial Sequence
  Description of Artificial Sequence: Synthetic oligonucleotide
uugcuuugugucuaguuuucuag

SEQ ID NO: 905 - RNA, 23 nt, Artificial Sequence
  Description of Artificial Sequence: Synthetic oligonucleotide
gucuaguuuucuagacccuucau

SEQ ID NO: 906 - RNA, 23 nt, Artificial Sequence
  Description of Artificial Sequence: Synthetic oligonucleotide
uuuucuagacccuucaucucuua

SEQ ID NO: 907 - RNA, 23 nt, Artificial Sequence
  Description of Artificial Sequence: Synthetic oligonucleotide
agacccuucaucucuuacuugau

SEQ ID NO: 908 - RNA, 23 nt, Artificial Sequence
  Description of Artificial Sequence: Synthetic oligonucleotide
ucaucucuuacuugauagacuua

SEQ ID NO: 909 - RNA, 23 nt, Artificial Sequence
  Description of Artificial Sequence: Synthetic oligonucleotide
cuuacuugauagacuuacuaaua

SEQ ID NO: 910 - RNA, 23 nt, Artificial Sequence
  Description of Artificial Sequence: Synthetic oligonucleotide
gacuuacuaauaaaaugugaaga

SEQ ID NO: 911 - RNA, 23 nt, Artificial Sequence
  Description of Artificial Sequence: Synthetic oligonucleotide
auaaaaugugaagacuagaccaa

SEQ ID NO: 912 - RNA, 23 nt, Artificial Sequence
  Description of Artificial Sequence: Synthetic oligonucleotide
ugugaagacuagaccaauuguca

SEQ ID NO: 913 - RNA, 23 nt, Artificial Sequence
  Description of Artificial Sequence: Synthetic oligonucleotide
acuagaccaauugucaugcuuga

SEQ ID NO: 914 - RNA, 23 nt, Artificial Sequence
  Description of Artificial Sequence: Synthetic oligonucleotide
ugucaugcuugacacaacugcug

SEQ ID NO: 915 - RNA, 23 nt, Artificial Sequence
  Description of Artificial Sequence: Synthetic oligonucleotide
gcuugacacaacugcuguggcug

SEQ ID NO: 916 - RNA, 23 nt, Artificial Sequence
  Description of Artificial Sequence: Synthetic oligonucleotide
ugcuguggcugguuggugcuuug

SEQ ID NO: 917 - RNA, 23 nt, Artificial Sequence
  Description of Artificial Sequence: Synthetic oligonucleotide
ggcugguuggugcuuuguuuaug

SEQ ID NO: 918 - RNA, 23 nt, Artificial Sequence
  Description of Artificial Sequence: Synthetic oligonucleotide
uuggugcuuuguuuaugguagua

SEQ ID NO: 919 - RNA, 23 nt, Artificial Sequence
  Description of Artificial Sequence: Synthetic oligonucleotide
cuuuguuuaugguaguaguuuuu

SEQ ID NO: 920 - RNA, 23 nt, Artificial Sequence
  Description of Artificial Sequence: Synthetic oligonucleotide
uaugguaguaguuuuucuguaac

SEQ ID NO: 921 - RNA, 23 nt, Artificial Sequence
  Description of Artificial Sequence: Synthetic oligonucleotide
aguaguuuuucuguaacacagaa

SEQ ID NO: 922 - RNA, 23 nt, Artificial Sequence
  Description of Artificial Sequence: Synthetic oligonucleotide
uuuucuguaacacagaauauagg

SEQ ID NO: 923 - RNA, 23 nt, Artificial Sequence
  Description of Artificial Sequence: Synthetic oligonucleotide
aacacagaauauaggauaagaaa

SEQ ID NO: 924 - RNA, 23 nt, Artificial Sequence
  Description of Artificial Sequence: Synthetic oligonucleotide
uaagaauaaaguaccuugacuuu

SEQ ID NO: 925 - RNA, 23 nt, Artificial Sequence
  Description of Artificial Sequence: Synthetic oligonucleotide
accuugacuuuguucacagcaug

SEQ ID NO: 926 - RNA, 23 nt, Artificial Sequence
  Description of Artificial Sequence: Synthetic oligonucleotide
acuuuguucacagcauguagggu

SEQ ID NO: 927 - RNA, 23 nt, Artificial Sequence
  Description of Artificial Sequence: Synthetic oligonucleotide
uucacagcauguagggugaugag

SEQ ID NO: 928 - RNA, 23 nt, Artificial Sequence
  Description of Artificial Sequence: Synthetic oligonucleotide
uguagggugaugagcacucacaa

SEQ ID NO: 929 - RNA, 23 nt, Artificial Sequence
  Description of Artificial Sequence: Synthetic oligonucleotide
gugaugagcacucacaauuguug

SEQ ID NO: 930 - RNA, 23 nt, Artificial Sequence
  Description of Artificial Sequence: Synthetic oligonucleotide
gcacucacaauuguugacuaaaa

SEQ ID NO: 931 - RNA, 23 nt, Artificial Sequence
  Description of Artificial Sequence: Synthetic oligonucleotide
uguugacuaaaaugcugcuuuua

SEQ ID NO: 932 - RNA, 23 nt, Artificial Sequence
  Description of Artificial Sequence: Synthetic oligonucleotide
aaaugcugcuuuuaaaacauagg

SEQ ID NO: 933 - RNA, 23 nt, Artificial Sequence
  Description of Artificial Sequence: Synthetic oligonucleotide
ugcuuuuaaaacauaggaaagua

SEQ ID NO: 934 - RNA, 23 nt, Artificial Sequence
  Description of Artificial Sequence: Synthetic oligonucleotide
aacauaggaaaguagaaugguug

SEQ ID NO: 935 - RNA, 23 nt, Artificial Sequence
  Description of Artificial Sequence: Synthetic oligonucleotide
aaaguagaaugguugagugcaaa

SEQ ID NO: 936 - RNA, 23 nt, Artificial Sequence
  Description of Artificial Sequence: Synthetic oligonucleotide
gaaugguugagugcaaauccaua

SEQ ID NO: 937 - RNA, 23 nt, Artificial Sequence
  Description of Artificial Sequence: Synthetic oligonucleotide
ugagugcaaauccauagcacaag

SEQ ID NO: 938 - RNA, 23 nt, Artificial Sequence
  Description of Artificial Sequence: Synthetic oligonucleotide
aauccauagcacaagauaaauug

SEQ ID NO: 939 - RNA, 23 nt, Artificial Sequence
  Description of Artificial Sequence: Synthetic oligonucleotide
cacaagauaaauugagcuaguua

SEQ ID NO: 940 - RNA, 23 nt, Artificial Sequence
  Description of Artificial Sequence: Synthetic oligonucleotide
uugagcuaguuaaggcaaaucag

SEQ ID NO: 941 - RNA, 23 nt, Artificial Sequence
  Description of Artificial Sequence: Synthetic oligonucleotide
guuaaggcaaaucagguaaaaua

SEQ ID NO: 942 - RNA, 23 nt, Artificial Sequence
  Description of Artificial Sequence: Synthetic oligonucleotide
ucagguaaaauagucaugauucu

SEQ ID NO: 943 - RNA, 23 nt, Artificial Sequence
  Description of Artificial Sequence: Synthetic oligonucleotide
uagucaugauucuauguaaugua

SEQ ID NO: 944 - RNA, 23 nt, Artificial Sequence
  Description of Artificial Sequence: Synthetic oligonucleotide
ucuauguaauguaaaccagaaaa

SEQ ID NO: 945 - RNA, 23 nt, Artificial Sequence
  Description of Artificial Sequence: Synthetic oligonucleotide
guucaugauuucaagauguuaua

SEQ ID NO: 946 - RNA, 23 nt, Artificial Sequence
  Description of Artificial Sequence: Synthetic oligonucleotide
gacuuuugaauuacagagauaua

SEQ ID NO: 947 - RNA, 23 nt, Artificial Sequence
  Description of Artificial Sequence: Synthetic oligonucleotide
aauuagaguugugauacagagua

SEQ ID NO: 948 - RNA, 23 nt, Artificial Sequence
  Description of Artificial Sequence: Synthetic oligonucleotide
gauacagaguauauuuccauuca

SEQ ID NO: 949 - RNA, 23 nt, Artificial Sequence
  Description of Artificial Sequence: Synthetic oligonucleotide
guauauuuccauucagacaauau

SEQ ID NO: 950 - RNA, 23 nt, Artificial Sequence
  Description of Artificial Sequence: Synthetic oligonucleotide
cauucagacaauauaucauaacu

SEQ ID NO: 951 - RNA, 23 nt, Artificial Sequence
  Description of Artificial Sequence: Synthetic oligonucleotide
aguugugauacagaguauauuuc

SEQ ID NO: 952 - RNA, 21 nt, Artificial Sequence
  Description of Artificial Sequence: Synthetic oligonucleotide
agaucggugccgauuccugcu

SEQ ID NO: 953 - RNA, 21 nt, Artificial Sequence
  Description of Artificial Sequence: Synthetic oligonucleotide
cgcgaccaugucccaucacuu

SEQ ID NO: 954 - RNA, 21 nt, Artificial Sequence
  Description of Artificial Sequence: Synthetic oligonucleotide
guacggcaaacacaacggacu

SEQ ID NO: 955 - RNA, 21 nt, Artificial Sequence
  Description of Artificial Sequence: Synthetic oligonucleotide
caaacacaacggaccugagcu

SEQ ID NO: 956 - RNA, 21 nt, Artificial Sequence
  Description of Artificial Sequence: Synthetic oligonucleotide
ggaccugagcacuggcauaau

SEQ ID NO: 957 - RNA, 21 nt, Artificial Sequence
  Description of Artificial Sequence: Synthetic oligonucleotide
gagcacuggcauaaggacuuu

SEQ ID NO: 958 - RNA, 21 nt, Artificial Sequence
  Description of Artificial Sequence: Synthetic oligonucleotide
guugacaucgacacucauacu

SEQ ID NO: 959 - RNA, 21 nt, Artificial Sequence
  Description of Artificial Sequence: Synthetic oligonucleotide
acacucauacagccaaguauu

SEQ ID NO: 960 - RNA, 21 nt, Artificial Sequence
  Description of Artificial Sequence: Synthetic oligonucleotide
uacagccaaguaugacccuuu

SEQ ID NO: 961 - RNA, 21 nt, Artificial Sequence
  Description of Artificial Sequence: Synthetic oligonucleotide
caaguaugacccuucccugau

SEQ ID NO: 962 - RNA, 21 nt, Artificial Sequence
  Description of Artificial Sequence: Synthetic oligonucleotide
ugucuguuuccuaugaucaau

SEQ ID NO: 963 - RNA, 21 nt, Artificial Sequence
  Description of Artificial Sequence: Synthetic oligonucleotide
ccuaugaucaagcaacuuccu

SEQ ID NO: 964 - RNA, 21 nt, Artificial Sequence
  Description of Artificial Sequence: Synthetic oligonucleotide
caagcaacuucccugaggauu

SEQ ID NO: 965 - RNA, 21 nt, Artificial Sequence
  Description of Artificial Sequence: Synthetic oligonucleotide
cccugaggauccucaacaauu

SEQ ID NO: 966 - RNA, 21 nt, Artificial Sequence
  Description of Artificial Sequence: Synthetic oligonucleotide
uccucaacaauggucaugcuu

SEQ ID NO: 967 - RNA, 21 nt, Artificial Sequence
  Description of Artificial Sequence: Synthetic oligonucleotide
acaauggucaugcuuucaacu

SEQ ID NO: 968 - RNA, 21 nt, Artificial Sequence
  Description of Artificial Sequence: Synthetic oligonucleotide
augcuuucaacguggaguuuu

SEQ ID NO: 969 - RNA, 21 nt, Artificial Sequence
  Description of Artificial Sequence: Synthetic oligonucleotide
aacguggaguuugaugacucu

SEQ ID NO: 970 - RNA, 21 nt, Artificial Sequence
  Description of Artificial Sequence: Synthetic oligonucleotide
ugaugacucucaggacaaagu

SEQ ID NO: 971 - RNA, 21 nt, Artificial Sequence
  Description of Artificial Sequence: Synthetic oligonucleotide
ucucaggacaaagcagugcuu

SEQ ID NO: 972 - RNA, 21 nt, Artificial Sequence
  Description of Artificial Sequence: Synthetic oligonucleotide
gacaaagcagugcucaagggu

SEQ ID NO: 973 - RNA, 21 nt, Artificial Sequence
  Description of Artificial Sequence: Synthetic oligonucleotide
uggcacuuacagauugauucu

SEQ ID NO: 974 - RNA, 21 nt, Artificial Sequence
  Description of Artificial Sequence: Synthetic oligonucleotide
uuacagauugauucaguuucu

SEQ ID NO: 975 - RNA, 21 nt, Artificial Sequence
  Description of Artificial Sequence: Synthetic oligonucleotide
auucaguuucacuuucacugu

SEQ ID NO: 976 - RNA, 21 nt, Artificial Sequence
  Description of Artificial Sequence: Synthetic oligonucleotide
ucacuugauggacaagguucu

SEQ ID NO: 977 - RNA, 21 nt, Artificial Sequence
  Description of Artificial Sequence: Synthetic oligonucleotide
gauggacaagguucagagcau

SEQ ID NO: 978 - RNA, 21 nt, Artificial Sequence
  Description of Artificial Sequence: Synthetic oligonucleotide
caagguucagagcauacuguu

SEQ ID NO: 979 - RNA, 21 nt, Artificial Sequence
  Description of Artificial Sequence: Synthetic oligonucleotide
ucagagcauacuguggauaau

SEQ ID NO: 980 - RNA, 21 nt, Artificial Sequence
  Description of Artificial Sequence: Synthetic oligonucleotide
aagaaauaugcugcagaacuu

SEQ ID NO: 981 - RNA, 21 nt, Artificial Sequence
  Description of Artificial Sequence: Synthetic oligonucleotide
uaugcugcagaacuucacuuu

SEQ ID NO: 982 - RNA, 21 nt, Artificial Sequence
  Description of Artificial Sequence: Synthetic oligonucleotide
gcagaacuucacuugguucau

SEQ ID NO: 983 - RNA, 21 nt, Artificial Sequence
  Description of Artificial Sequence: Synthetic oligonucleotide
cuucacuugguucacuggaau

SEQ ID NO: 984 - RNA, 21 nt, Artificial Sequence
  Description of Artificial Sequence: Synthetic oligonucleotide
ucacuggaacaccaaauaugu

SEQ ID NO: 985 - RNA, 21 nt, Artificial Sequence
  Description of Artificial Sequence: Synthetic oligonucleotide
uuugggaaagcugugcagcau

SEQ ID NO: 986 - RNA, 21 nt, Artificial Sequence
  Description of Artificial Sequence: Synthetic oligonucleotide
gugcagcaaccugauggacuu

SEQ ID NO: 987 - RNA, 21 nt, Artificial Sequence
  Description of Artificial Sequence: Synthetic oligonucleotide
caaccugauggacuggccguu

SEQ ID NO: 988 - RNA, 21 nt, Artificial Sequence
  Description of Artificial Sequence: Synthetic oligonucleotide
cuggccguucuagguauuuuu

SEQ ID NO: 989 - RNA, 21 nt, Artificial Sequence
  Description of Artificial Sequence: Synthetic oligonucleotide
ugaagguuggcagcgcuaaau

SEQ ID NO: 990 - RNA, 21 nt, Artificial Sequence
  Description of Artificial Sequence: Synthetic oligonucleotide
gcagcgcuaaaccgggccuuu

SEQ ID NO: 991 - RNA, 21 nt, Artificial Sequence
  Description of Artificial Sequence: Synthetic oligonucleotide
ccgggccuucagaaaguuguu

SEQ ID NO: 992 - RNA, 21 nt, Artificial Sequence
  Description of Artificial Sequence: Synthetic oligonucleotide
cuucagaaaguuguugauguu

SEQ ID NO: 993 - RNA, 21 nt, Artificial Sequence
  Description of Artificial Sequence: Synthetic oligonucleotide
guuguugaugugcuggauucu

SEQ ID NO: 994 - RNA, 21 nt, Artificial Sequence
  Description of Artificial Sequence: Synthetic oligonucleotide
gcuggauuccauuaaaacaau

SEQ ID NO: 995 - RNA, 21 nt, Artificial Sequence
  Description of Artificial Sequence: Synthetic oligonucleotide
uccauuaaaacaaagggcaau

SEQ ID NO: 996 - RNA, 21 nt, Artificial Sequence
  Description of Artificial Sequence: Synthetic oligonucleotide
aaaacaaagggcaagagugcu

SEQ ID NO: 997 - RNA, 21 nt, Artificial Sequence
  Description of Artificial Sequence: Synthetic oligonucleotide
ggcaagagugcugacuucacu

SEQ ID NO: 998 - RNA, 21 nt, Artificial Sequence
  Description of Artificial Sequence: Synthetic oligonucleotide
gugcugacuucacuaacuucu

SEQ ID NO: 999 - RNA, 21 nt, Artificial Sequence
  Description of Artificial Sequence: Synthetic oligonucleotide
acuucacuaacuucgauccuu

SEQ ID NO: 1000 - RNA, 21 nt, Artificial Sequence
  Description of Artificial Sequence: Synthetic oligonucleotide
cgauccucguggccuccuucu

SEQ ID NO: 1001 - RNA, 21 nt, Artificial Sequence
  Description of Artificial Sequence: Synthetic oligonucleotide
ucguggccuccuuccugaauu

SEQ ID NO: 1002 - RNA, 21 nt, Artificial Sequence
  Description of Artificial Sequence: Synthetic oligonucleotide
ccuccuuccugaauccuuggu

SEQ ID NO: 1003 - RNA, 21 nt, Artificial Sequence
  Description of Artificial Sequence: Synthetic oligonucleotide
ccugaauccuuggauuacugu

SEQ ID NO: 1004 - RNA, 21 nt, Artificial Sequence
  Description of Artificial Sequence: Synthetic oligonucleotide
uccuuggauuacuggaccuau

SEQ ID NO: 1005 - RNA, 21 nt, Artificial Sequence
  Description of Artificial Sequence: Synthetic oligonucleotide
ccuacccaggcucacugaccu

SEQ ID NO: 1006 - RNA, 21 nt, Artificial Sequence
  Description of Artificial Sequence: Synthetic oligonucleotide
ccucuucuggaaugugugacu

SEQ ID NO: 1007 - RNA, 21 nt, Artificial Sequence
  Description of Artificial Sequence: Synthetic oligonucleotide
uggaaugugugaccuggauuu

SEQ ID NO: 1008 - RNA, 21 nt, Artificial Sequence
  Description of Artificial Sequence: Synthetic oligonucleotide
ugugaccuggauugugcucau

SEQ ID NO: 1009 - RNA, 21 nt, Artificial Sequence
  Description of Artificial Sequence: Synthetic oligonucleotide
cuggauugugcucaaggaacu

SEQ ID NO: 1010 - RNA, 21 nt, Artificial Sequence
  Description of Artificial Sequence: Synthetic oligonucleotide
cucaaggaacccaucagcguu

SEQ ID NO: 1011 - RNA, 21 nt, Artificial Sequence
  Description of Artificial Sequence: Synthetic oligonucleotide
gaacccaucagcgucagcagu

SEQ ID NO: 1012 - RNA, 21 nt, Artificial Sequence
  Description of Artificial Sequence: Synthetic oligonucleotide
cgagcagguguugaaauuccu

SEQ ID NO: 1013 - RNA, 21 nt, Artificial Sequence
  Description of Artificial Sequence: Synthetic oligonucleotide
gguguugaaauuccguaaacu

SEQ ID NO: 1014 - RNA, 21 nt, Artificial Sequence
  Description of Artificial Sequence: Synthetic oligonucleotide
gaaauuccguaaacuuaacuu

SEQ ID NO: 1015 - RNA, 21 nt, Artificial Sequence
  Description of Artificial Sequence: Synthetic oligonucleotide
ccguaaacuuaacuucaaugu

SEQ ID NO: 1016 - RNA, 21 nt, Artificial Sequence
  Description of Artificial Sequence: Synthetic oligonucleotide
gagggugaacccgaagaacuu

SEQ ID NO: 1017 - RNA, 21 nt, Artificial Sequence
  Description of Artificial Sequence: Synthetic oligonucleotide
gaacccgaagaacugaugguu

SEQ ID NO: 1018 - RNA, 21 nt, Artificial Sequence
  Description of Artificial Sequence: Synthetic oligonucleotide
agaacugaugguggacaacuu

SEQ ID NO: 1019 - RNA, 21 nt, Artificial Sequence
  Description of Artificial Sequence: Synthetic oligonucleotide
augguggacaacuggcgcccu

SEQ ID NO: 1020 - RNA, 21 nt, Artificial Sequence
  Description of Artificial Sequence: Synthetic oligonucleotide
ccagcucagccacugaagaau

SEQ ID NO: 1021 - RNA, 21 nt, Artificial Sequence
  Description of Artificial Sequence: Synthetic oligonucleotide
cagccacugaagaacaggcau

SEQ ID NO: 1022 - RNA, 21 nt, Artificial Sequence
  Description of Artificial Sequence: Synthetic oligonucleotide
cugaagaacaggcaaaucaau

SEQ ID NO: 1023 - RNA, 21 nt, Artificial Sequence
  Description of Artificial Sequence: Synthetic oligonucleotide
ggcaaaucaaagcuuccuucu

SEQ ID NO: 1024 - RNA, 21 nt, Artificial Sequence
  Description of Artificial Sequence: Synthetic oligonucleotide
caaagcuuccuucaaauaagu

SEQ ID NO: 1025 - RNA, 21 nt, Artificial Sequence
  Description of Artificial Sequence: Synthetic oligonucleotide
uuccuucaaauaagauggucu

SEQ ID NO: 1026 - RNA, 21 nt, Artificial Sequence
  Description of Artificial Sequence: Synthetic oligonucleotide
auaagauggucccauagucuu

SEQ ID NO: 1027 - RNA, 21 nt, Artificial Sequence
  Description of Artificial Sequence: Synthetic oligonucleotide
uggucccauagucuguauccu

SEQ ID NO: 1028 - RNA, 21 nt, Artificial Sequence
  Description of Artificial Sequence: Synthetic oligonucleotide
auagucuguauccaaauaauu

SEQ ID NO: 1029 - RNA, 21 nt, Artificial Sequence
  Description of Artificial Sequence: Synthetic oligonucleotide
guauccaaauaaugaaucuuu

SEQ ID NO: 1030 - RNA, 21 nt, Artificial Sequence
  Description of Artificial Sequence: Synthetic oligonucleotide
auaaugaaucuucggguguuu

SEQ ID NO: 1031 - RNA, 21 nt, Artificial Sequence
  Description of Artificial Sequence: Synthetic oligonucleotide
aucuucggguguuucccuuuu

SEQ ID NO: 1032 - RNA, 21 nt, Artificial Sequence
  Description of Artificial Sequence: Synthetic oligonucleotide
ggguguuucccuuuagcuaau

SEQ ID NO: 1033 - RNA, 21 nt, Artificial Sequence
  Description of Artificial Sequence: Synthetic oligonucleotide
cccuuuagcuaagcacagauu

SEQ ID NO: 1034 - RNA, 21 nt, Artificial Sequence
  Description of Artificial Sequence: Synthetic oligonucleotide
agcuaagcacagaucuaccuu

SEQ ID NO: 1035 - RNA, 21 nt, Artificial Sequence
  Description of Artificial Sequence: Synthetic oligonucleotide
cagaucuaccuuggugauuuu

SEQ ID NO: 1036 - RNA, 21 nt, Artificial Sequence
  Description of Artificial Sequence: Synthetic oligonucleotide
accuuggugauuuggacccuu

SEQ ID NO: 1037 - RNA, 21 nt, Artificial Sequence
  Description of Artificial Sequence: Synthetic oligonucleotide
uuggacccugguugcuuuguu

SEQ ID NO: 1038 - RNA, 21 nt, Artificial Sequence
  Description of Artificial Sequence: Synthetic oligonucleotide
cugguugcuuugugucuaguu

SEQ ID NO: 1039 - RNA, 21 nt, Artificial Sequence
  Description of Artificial Sequence: Synthetic oligonucleotide
gcuuugugucuaguuuucuau

SEQ ID NO: 1040 - RNA, 21 nt, Artificial Sequence
  Description of Artificial Sequence: Synthetic oligonucleotide
cuaguuuucuagacccuucau

SEQ ID NO: 1041 - RNA, 21 nt, Artificial Sequence
  Description of Artificial Sequence: Synthetic oligonucleotide
uucuagacccuucaucucuuu

SEQ ID NO: 1042 - RNA, 21 nt, Artificial Sequence
  Description of Artificial Sequence: Synthetic oligonucleotide
acccuucaucucuuacuugau

SEQ ID NO: 1043 - RNA, 21 nt, Artificial Sequence
  Description of Artificial Sequence: Synthetic oligonucleotide
aucucuuacuugauagacuuu

SEQ ID NO: 1044 - RNA, 21 nt, Artificial Sequence
  Description of Artificial Sequence: Synthetic oligonucleotide
uacuugauagacuuacuaauu

SEQ ID NO: 1045 - RNA, 21 nt, Artificial Sequence
  Description of Artificial Sequence: Synthetic oligonucleotide
cuuacuaauaaaaugugaagu

SEQ ID NO: 1046 - RNA, 21 nt, Artificial Sequence
  Description of Artificial Sequence: Synthetic oligonucleotide
aaaaugugaagacuagaccau

SEQ ID NO: 1047 - RNA, 21 nt, Artificial Sequence
  Description of Artificial Sequence: Synthetic oligonucleotide
ugaagacuagaccaauugucu

SEQ ID NO: 1048 - RNA, 21 nt, Artificial Sequence
  Description of Artificial Sequence: Synthetic oligonucleotide
uagaccaauugucaugcuugu

SEQ ID NO: 1049 - RNA, 21 nt, Artificial Sequence
  Description of Artificial Sequence: Synthetic oligonucleotide
ucaugcuugacacaacugcuu

SEQ ID NO: 1050 - RNA, 21 nt, Artificial Sequence
  Description of Artificial Sequence: Synthetic oligonucleotide
uugacacaacugcuguggcuu

SEQ ID NO: 1051 - RNA, 21 nt, Artificial Sequence
  Description of Artificial Sequence: Synthetic oligonucleotide
cuguggcugguuggugcuuuu

SEQ ID NO: 1052 - RNA, 21 nt, Artificial Sequence
  Description of Artificial Sequence: Synthetic oligonucleotide
cugguuggugcuuuguuuauu

SEQ ID NO: 1053 - RNA, 21 nt, Artificial Sequence
  Description of Artificial Sequence: Synthetic oligonucleotide
ggugcuuuguuuaugguaguu

SEQ ID NO: 1054 - RNA, 21 nt, Artificial Sequence
  Description of Artificial Sequence: Synthetic oligonucleotide
uuguuuaugguaguaguuuuu

SEQ ID NO: 1055 - RNA, 21 nt, Artificial Sequence
  Description of Artificial Sequence: Synthetic oligonucleotide
ugguaguaguuuuucuguaau

SEQ ID NO: 1056 - RNA, 21 nt, Artificial Sequence
  Description of Artificial Sequence: Synthetic oligonucleotide
uaguuuuucuguaacacagau

SEQ ID NO: 1057 - RNA, 21 nt, Artificial Sequence
  Description of Artificial Sequence: Synthetic oligonucleotide
uucuguaacacagaauauagu

SEQ ID NO: 1058 - RNA, 21 nt, Artificial Sequence
  Description of Artificial Sequence: Synthetic oligonucleotide
cacagaauauaggauaagaau

SEQ ID NO: 1059 - RNA, 21 nt, Artificial Sequence
  Description of Artificial Sequence: Synthetic oligonucleotide
agaauaaaguaccuugacuuu

SEQ ID NO: 1060 - RNA, 21 nt, Artificial Sequence
  Description of Artificial Sequence: Synthetic oligonucleotide
cuugacuuuguucacagcauu

SEQ ID NO: 1061 - RNA, 21 nt, Artificial Sequence
  Description of Artificial Sequence: Synthetic oligonucleotide
uuuguucacagcauguagggu

SEQ ID NO: 1062 - RNA, 21 nt, Artificial Sequence
  Description of Artificial Sequence: Synthetic oligonucleotide
cacagcauguagggugaugau

SEQ ID NO: 1063 - RNA, 21 nt, Artificial Sequence
  Description of Artificial Sequence: Synthetic oligonucleotide
uagggugaugagcacucacau

SEQ ID NO: 1064 - RNA, 21 nt, Artificial Sequence
  Description of Artificial Sequence: Synthetic oligonucleotide
gaugagcacucacaauuguuu

SEQ ID NO: 1065 - RNA, 21 nt, Artificial Sequence
  Description of Artificial Sequence: Synthetic oligonucleotide
acucacaauuguugacuaaau

SEQ ID NO: 1066 - RNA, 21 nt, Artificial Sequence
  Description of Artificial Sequence: Synthetic oligonucleotide
uugacuaaaaugcugcuuuuu

SEQ ID NO: 1067 - RNA, 21 nt, Artificial Sequence
  Description of Artificial Sequence: Synthetic oligonucleotide
augcugcuuuuaaaacauagu

SEQ ID NO: 1068 - RNA, 21 nt, Artificial Sequence
  Description of Artificial Sequence: Synthetic oligonucleotide
cuuuuaaaacauaggaaaguu

SEQ ID NO: 1069 - RNA, 21 nt, Artificial Sequence
  Description of Artificial Sequence: Synthetic oligonucleotide
cauaggaaaguagaaugguuu

SEQ ID NO: 1070 - RNA, 21 nt, Artificial Sequence
  Description of Artificial Sequence: Synthetic oligonucleotide
aguagaaugguugagugcaau

SEQ ID NO: 1071 - RNA, 21 nt, Artificial Sequence
  Description of Artificial Sequence: Synthetic oligonucleotide
augguugagugcaaauccauu

SEQ ID NO: 1072 - RNA, 21 nt, Artificial Sequence
  Description of Artificial Sequence: Synthetic oligonucleotide
agugcaaauccauagcacaau

SEQ ID NO: 1073 - RNA, 21 nt, Artificial Sequence
  Description of Artificial Sequence: Synthetic oligonucleotide
uccauagcacaagauaaauuu

SEQ ID NO: 1074 - RNA, 21 nt, Artificial Sequence
  Description of Artificial Sequence: Synthetic oligonucleotide
caagauaaauugagcuaguuu

SEQ ID NO: 1075 - RNA, 21 nt, Artificial Sequence
  Description of Artificial Sequence: Synthetic oligonucleotide
gagcuaguuaaggcaaaucau

SEQ ID NO: 1076 - RNA, 21 nt, Artificial Sequence
  Description of Artificial Sequence: Synthetic oligonucleotide
uaaggcaaaucagguaaaauu

SEQ ID NO: 1077 - RNA, 21 nt, Artificial Sequence
  Description of Artificial Sequence: Synthetic oligonucleotide
agguaaaauagucaugauucu

SEQ ID NO: 1078 - RNA, 21 nt, Artificial Sequence
  Description of Artificial Sequence: Synthetic oligonucleotide
gucaugauucuauguaauguu

SEQ ID NO: 1079 - RNA, 21 nt, Artificial Sequence
  Description of Artificial Sequence: Synthetic oligonucleotide
uauguaauguaaaccagaaau

SEQ ID NO: 1080 - RNA, 21 nt, Artificial Sequence
  Description of Artificial Sequence: Synthetic oligonucleotide
ucaugauuucaagauguuauu

SEQ ID NO: 1081 - RNA, 21 nt, Artificial Sequence
  Description of Artificial Sequence: Synthetic oligonucleotide
cuuuugaauuacagagauauu

SEQ ID NO: 1082 - RNA, 21 nt, Artificial Sequence
  Description of Artificial Sequence: Synthetic oligonucleotide
uuagaguugugauacagaguu

SEQ ID NO: 1083 - RNA, 21 nt, Artificial Sequence
  Description of Artificial Sequence: Synthetic oligonucleotide
uugugauacagaguauauuuu

SEQ ID NO: 1084 - RNA, 21 nt, Artificial Sequence
  Description of Artificial Sequence: Synthetic oligonucleotide
uacagaguauauuuccauucu

SEQ ID NO: 1085 - RNA, 21 nt, Artificial Sequence
  Description of Artificial Sequence: Synthetic oligonucleotide
auauuuccauucagacaauau

SEQ ID NO: 1086 - RNA, 21 nt, Artificial Sequence
  Description of Artificial Sequence: Synthetic oligonucleotide
uucagacaauauaucauaacu

SEQ ID NO: 1087 - RNA, 23 nt, Artificial Sequence
  Description of Artificial Sequence: Synthetic oligonucleotide
agcaggaaucggcaccgaucugg

SEQ ID NO: 1088 - RNA, 23 nt, Artificial Sequence
  Description of Artificial Sequence: Synthetic oligonucleotide
aagugaugggacauggucgcgcu

SEQ ID NO: 1089 - RNA, 23 nt, Artificial Sequence
  Description of Artificial Sequence: Synthetic oligonucleotide
aguccguuguguuugccguaccc

SEQ ID NO: 1090 - RNA, 23 nt, Artificial Sequence
  Description of Artificial Sequence: Synthetic oligonucleotide
agcucagguccguuguguuugcc

SEQ ID NO: 1091 - RNA, 23 nt, Artificial Sequence
  Description of Artificial Sequence: Synthetic oligonucleotide
auuaugccagugcucagguccgu

SEQ ID NO: 1092 - RNA, 23 nt, Artificial Sequence
  Description of Artificial Sequence: Synthetic oligonucleotide
aaaguccuuaugccagugcucag

SEQ ID NO: 1093 - RNA, 23 nt, Artificial Sequence
  Description of Artificial Sequence: Synthetic oligonucleotide
aguaugagugucgaugucaacag

SEQ ID NO: 1094 - RNA, 23 nt, Artificial Sequence
  Description of Artificial Sequence: Synthetic oligonucleotide
aauacuuggcuguaugagugucg

SEQ ID NO: 1095 - RNA, 23 nt, Artificial Sequence
  Description of Artificial Sequence: Synthetic oligonucleotide
aaagggucauacuuggcuguaug

SEQ ID NO: 1096 - RNA, 23 nt, Artificial Sequence
  Description of Artificial Sequence: Synthetic oligonucleotide
aucagggaagggucauacuuggc

SEQ ID NO: 1097 - RNA, 23 nt, Artificial Sequence
  Description of Artificial Sequence: Synthetic oligonucleotide
auugaucauaggaaacagacagg

SEQ ID NO: 1098 - RNA, 23 nt, Artificial Sequence
  Description of Artificial Sequence: Synthetic oligonucleotide
aggaaguugcuugaucauaggaa

SEQ ID NO: 1099 - RNA, 23 nt, Artificial Sequence
  Description of Artificial Sequence: Synthetic oligonucleotide
aauccucagggaaguugcuugau

SEQ ID NO: 1100 - RNA, 23 nt, Artificial Sequence
  Description of Artificial Sequence: Synthetic oligonucleotide
aauuguugaggauccucagggaa

SEQ ID NO: 1101 - RNA, 23 nt, Artificial Sequence
  Description of Artificial Sequence: Synthetic oligonucleotide
aagcaugaccauuguugaggauc

SEQ ID NO: 1102 - RNA, 23 nt, Artificial Sequence
  Description of Artificial Sequence: Synthetic oligonucleotide
aguugaaagcaugaccauuguug

SEQ ID NO: 1103 - RNA, 23 nt, Artificial Sequence
  Description of Artificial Sequence: Synthetic oligonucleotide
aaaacuccacguugaaagcauga

SEQ ID NO: 1104 - RNA, 23 nt, Artificial Sequence
  Description of Artificial Sequence: Synthetic oligonucleotide
agagucaucaaacuccacguuga

SEQ ID NO: 1105 - RNA, 23 nt, Artificial Sequence
  Description of Artificial Sequence: Synthetic oligonucleotide
acuuuguccugagagucaucaaa

SEQ ID NO: 1106 - RNA, 23 nt, Artificial Sequence
  Description of Artificial Sequence: Synthetic oligonucleotide
aagcacugcuuuguccugagagu

SEQ ID NO: 1107 - RNA, 23 nt, Artificial Sequence
  Description of Artificial Sequence: Synthetic oligonucleotide
acccuugagcacugcuuuguccu

SEQ ID NO: 1108 - RNA, 23 nt, Artificial Sequence
  Description of Artificial Sequence: Synthetic oligonucleotide
agaaucaaucuguaagugccauc

SEQ ID NO: 1109 - RNA, 23 nt, Artificial Sequence
  Description of Artificial Sequence: Synthetic oligonucleotide
agaaacugaaucaaucuguaagu

SEQ ID NO: 1110 - RNA, 23 nt, Artificial Sequence
  Description of Artificial Sequence: Synthetic oligonucleotide
acagugaaagugaaacugaauca

SEQ ID NO: 1111 - RNA, 23 nt, Artificial Sequence
  Description of Artificial Sequence: Synthetic oligonucleotide
agaaccuuguccaucaagugaac

SEQ ID NO: 1112 - RNA, 23 nt, Artificial Sequence
  Description of Artificial Sequence: Synthetic oligonucleotide
augcucugaaccuuguccaucaa

SEQ ID NO: 1113 - RNA, 23 nt, Artificial Sequence
  Description of Artificial Sequence: Synthetic oligonucleotide
aacaguaugcucugaaccuuguc

SEQ ID NO: 1114 - RNA, 23 nt, Artificial Sequence
  Description of Artificial Sequence: Synthetic oligonucleotide
auuauccacaguaugcucugaac

SEQ ID NO: 1115 - RNA, 23 nt, Artificial Sequence
  Description of Artificial Sequence: Synthetic oligonucleotide
aaguucugcagcauauuucuuuu

SEQ ID NO: 1116 - RNA, 23 nt, Artificial Sequence
  Description of Artificial Sequence: Synthetic oligonucleotide
aaagugaaguucugcagcauauu

SEQ ID NO: 1117 - RNA, 23 nt, Artificial Sequence
  Description of Artificial Sequence: Synthetic oligonucleotide
augaaccaagugaaguucugcag

SEQ ID NO: 1118 - RNA, 23 nt, Artificial Sequence
  Description of Artificial Sequence: Synthetic oligonucleotide
auuccagugaaccaagugaaguu

SEQ ID NO: 1119 - RNA, 23 nt, Artificial Sequence
  Description of Artificial Sequence: Synthetic oligonucleotide
acauauuugguguuccagugaac

SEQ ID NO: 1120 - RNA, 23 nt, Artificial Sequence
  Description of Artificial Sequence: Synthetic oligonucleotide
augcugcacagcuuucccaaaau

SEQ ID NO: 1121 - RNA, 23 nt, Artificial Sequence
  Description of Artificial Sequence: Synthetic oligonucleotide
aaguccaucagguugcugcacag

SEQ ID NO: 1122 - RNA, 23 nt, Artificial Sequence
  Description of Artificial Sequence: Synthetic oligonucleotide
aacggccaguccaucagguugcu

SEQ ID NO: 1123 - RNA, 23 nt, Artificial Sequence
  Description of Artificial Sequence: Synthetic oligonucleotide
aaaaauaccuagaacggccaguc

SEQ ID NO: 1124 - RNA, 23 nt, Artificial Sequence
  Description of Artificial Sequence: Synthetic oligonucleotide
auuuagcgcugccaaccuucaaa

SEQ ID NO: 1125 - RNA, 23 nt, Artificial Sequence
  Description of Artificial Sequence: Synthetic oligonucleotide
aaaggcccgguuuagcgcugcca

SEQ ID NO: 1126 - RNA, 23 nt, Artificial Sequence
  Description of Artificial Sequence: Synthetic oligonucleotide
aacaacuuucugaaggcccgguu

SEQ ID NO: 1127 - RNA, 23 nt, Artificial Sequence
  Description of Artificial Sequence: Synthetic oligonucleotide
aacaucaacaacuuucugaaggc

SEQ ID NO: 1128 - RNA, 23 nt, Artificial Sequence
  Description of Artificial Sequence: Synthetic oligonucleotide
agaauccagcacaucaacaacuu

SEQ ID NO: 1129 - RNA, 23 nt, Artificial Sequence
  Description of Artificial Sequence: Synthetic oligonucleotide
auuguuuuaauggaauccagcac

SEQ ID NO: 1130 - RNA, 23 nt, Artificial Sequence
  Description of Artificial Sequence: Synthetic oligonucleotide
auugcccuuuguuuuaauggaau

SEQ ID NO: 1131 - RNA, 23 nt, Artificial Sequence
  Description of Artificial Sequence: Synthetic oligonucleotide
agcacucuugcccuuuguuuuaa

SEQ ID NO: 1132 - RNA, 23 nt, Artificial Sequence
  Description of Artificial Sequence: Synthetic oligonucleotide
agugaagucagcacucuugcccu

SEQ ID NO: 1133 - RNA, 23 nt, Artificial Sequence
  Description of Artificial Sequence: Synthetic oligonucleotide
agaaguuagugaagucagcacuc

SEQ ID NO: 1134 - RNA, 23 nt, Artificial Sequence
  Description of Artificial Sequence: Synthetic oligonucleotide
aaggaucgaaguuagugaaguca

SEQ ID NO: 1135 - RNA, 23 nt, Artificial Sequence
  Description of Artificial Sequence: Synthetic oligonucleotide
agaaggaggccacgaggaucgaa

SEQ ID NO: 1136 - RNA, 23 nt, Artificial Sequence
  Description of Artificial Sequence: Synthetic oligonucleotide
aauucaggaaggaggccacgagg

SEQ ID NO: 1137 - RNA, 23 nt, Artificial Sequence
  Description of Artificial Sequence: Synthetic oligonucleotide
accaaggauucaggaaggaggcc

SEQ ID NO: 1138 - RNA, 23 nt, Artificial Sequence
  Description of Artificial Sequence: Synthetic oligonucleotide
acaguaauccaaggauucaggaa

SEQ ID NO: 1139 - RNA, 23 nt, Artificial Sequence
  Description of Artificial Sequence: Synthetic oligonucleotide
auagguccaguaauccaaggauu

SEQ ID NO: 1140 - RNA, 23 nt, Artificial Sequence
  Description of Artificial Sequence: Synthetic oligonucleotide
aggucagugagccuggguagguc

SEQ ID NO: 1141 - RNA, 23 nt, Artificial Sequence
  Description of Artificial Sequence: Synthetic oligonucleotide
agucacacauuccagaagaggag

SEQ ID NO: 1142 - RNA, 23 nt, Artificial Sequence
  Description of Artificial Sequence: Synthetic oligonucleotide
aaauccaggucacacauuccaga

SEQ ID NO: 1143 - RNA, 23 nt, Artificial Sequence
  Description of Artificial Sequence: Synthetic oligonucleotide
augagcacaauccaggucacaca

SEQ ID NO: 1144 - RNA, 23 nt, Artificial Sequence
  Description of Artificial Sequence: Synthetic oligonucleotide
aguuccuugagcacaauccaggu

SEQ ID NO: 1145 - RNA, 23 nt, Artificial Sequence
  Description of Artificial Sequence: Synthetic oligonucleotide
aacgcugauggguuccuugagca

SEQ ID NO: 1146 - RNA, 23 nt, Artificial Sequence
  Description of Artificial Sequence: Synthetic oligonucleotide
acugcugacgcugauggguuccu

SEQ ID NO: 1147 - RNA, 23 nt, Artificial Sequence
  Description of Artificial Sequence: Synthetic oligonucleotide
aggaauuucaacaccugcucgcu

SEQ ID NO: 1148 - RNA, 23 nt, Artificial Sequence
  Description of Artificial Sequence: Synthetic oligonucleotide
aguuuacggaauuucaacaccug

SEQ ID NO: 1149 - RNA, 23 nt, Artificial Sequence
  Description of Artificial Sequence: Synthetic oligonucleotide
aaguuaaguuuacggaauuucaa

SEQ ID NO: 1150 - RNA, 23 nt, Artificial Sequence
  Description of Artificial Sequence: Synthetic oligonucleotide
acauugaaguuaaguuuacggaa

SEQ ID NO: 1151 - RNA, 23 nt, Artificial Sequence
  Description of Artificial Sequence: Synthetic oligonucleotide
aaguucuucggguucacccuccc

SEQ ID NO: 1152 - RNA, 23 nt, Artificial Sequence
  Description of Artificial Sequence: Synthetic oligonucleotide
aaccaucaguucuucggguucac

SEQ ID NO: 1153 - RNA, 23 nt, Artificial Sequence
  Description of Artificial Sequence: Synthetic oligonucleotide
aaguuguccaccaucaguucuuc

SEQ ID NO: 1154 - RNA, 23 nt, Artificial Sequence
  Description of Artificial Sequence: Synthetic oligonucleotide
agggcgccaguuguccaccauca

SEQ ID NO: 1155 - RNA, 23 nt, Artificial Sequence
  Description of Artificial Sequence: Synthetic oligonucleotide
auucuucaguggcugagcugggc

SEQ ID NO: 1156 - RNA, 23 nt, Artificial Sequence
  Description of Artificial Sequence: Synthetic oligonucleotide
augccuguucuucaguggcugag

SEQ ID NO: 1157 - RNA, 23 nt, Artificial Sequence
  Description of Artificial Sequence: Synthetic oligonucleotide
auugauuugccuguucuucagug

SEQ ID NO: 1158 - RNA, 23 nt, Artificial Sequence
  Description of Artificial Sequence: Synthetic oligonucleotide
agaaggaagcuuugauuugccug

SEQ ID NO: 1159 - RNA, 23 nt, Artificial Sequence
  Description of Artificial Sequence: Synthetic oligonucleotide
acuuauuugaaggaagcuuugau

SEQ ID NO: 1160 - RNA, 23 nt, Artificial Sequence
  Description of Artificial Sequence: Synthetic oligonucleotide
agaccaucuuauuugaaggaagc

SEQ ID NO: 1161 - RNA, 23 nt, Artificial Sequence
  Description of Artificial Sequence: Synthetic oligonucleotide
aagacuaugggaccaucuuauuu

SEQ ID NO: 1162 - RNA, 23 nt, Artificial Sequence
  Description of Artificial Sequence: Synthetic oligonucleotide
aggauacagacuaugggaccauc

SEQ ID NO: 1163 - RNA, 23 nt, Artificial Sequence
  Description of Artificial Sequence: Synthetic oligonucleotide
aauuauuuggauacagacuaugg

SEQ ID NO: 1164 - RNA, 23 nt, Artificial Sequence
  Description of Artificial Sequence: Synthetic oligonucleotide
aaagauucauuauuuggauacag

SEQ ID NO: 1165 - RNA, 23 nt, Artificial Sequence
  Description of Artificial Sequence: Synthetic oligonucleotide
aaacacccgaagauucauuauuu

SEQ ID NO: 1166 - RNA, 23 nt, Artificial Sequence
  Description of Artificial Sequence: Synthetic oligonucleotide
aaaagggaaacacccgaagauuc

SEQ ID NO: 1167 - RNA, 23 nt, Artificial Sequence
  Description of Artificial Sequence: Synthetic oligonucleotide
auuagcuaaagggaaacacccga

SEQ ID NO: 1168 - RNA, 23 nt, Artificial Sequence
  Description of Artificial Sequence: Synthetic oligonucleotide
aaucugugcuuagcuaaagggaa

SEQ ID NO: 1169 - RNA, 23 nt, Artificial Sequence
  Description of Artificial Sequence: Synthetic oligonucleotide
aagguagaucugugcuuagcuaa

SEQ ID NO: 1170 - RNA, 23 nt, Artificial Sequence
  Description of Artificial Sequence: Synthetic oligonucleotide
aaaaucaccaagguagaucugug

SEQ ID NO: 1171 - RNA, 23 nt, Artificial Sequence
  Description of Artificial Sequence: Synthetic oligonucleotide
aaggguccaaaucaccaagguag

SEQ ID NO: 1172 - RNA, 23 nt, Artificial Sequence
  Description of Artificial Sequence: Synthetic oligonucleotide
aacaaagcaaccaggguccaaau

SEQ ID NO: 1173 - RNA, 23 nt, Artificial Sequence
  Description of Artificial Sequence: Synthetic oligonucleotide
aacuagacacaaagcaaccaggg

SEQ ID NO: 1174 - RNA, 23 nt, Artificial Sequence
  Description of Artificial Sequence: Synthetic oligonucleotide
auagaaaacuagacacaaagcaa

SEQ ID NO: 1175 - RNA, 23 nt, Artificial Sequence
  Description of Artificial Sequence: Synthetic oligonucleotide
augaagggucuagaaaacuagac

SEQ ID NO: 1176 - RNA, 23 nt, Artificial Sequence
  Description of Artificial Sequence: Synthetic oligonucleotide
aaagagaugaagggucuagaaaa

SEQ ID NO: 1177 - RNA, 23 nt, Artificial Sequence
  Description of Artificial Sequence: Synthetic oligonucleotide
aucaaguaagagaugaagggucu

SEQ ID NO: 1178 - RNA, 23 nt, Artificial Sequence
  Description of Artificial Sequence: Synthetic oligonucleotide
aaagucuaucaaguaagagauga

SEQ ID NO: 1179 - RNA, 23 nt, Artificial Sequence
  Description of Artificial Sequence: Synthetic oligonucleotide
aauuaguaagucuaucaaguaag

SEQ ID NO: 1180 - RNA, 23 nt, Artificial Sequence
  Description of Artificial Sequence: Synthetic oligonucleotide
acuucacauuuuauuaguaaguc

SEQ ID NO: 1181 - RNA, 23 nt, Artificial Sequence
  Description of Artificial Sequence: Synthetic oligonucleotide
auggucuagucuucacauuuuau

SEQ ID NO: 1182 - RNA, 23 nt, Artificial Sequence
  Description of Artificial Sequence: Synthetic oligonucleotide
agacaauuggucuagucuucaca

SEQ ID NO: 1183 - RNA, 23 nt, Artificial Sequence
  Description of Artificial Sequence: Synthetic oligonucleotide
acaagcaugacaauuggucuagu

SEQ ID NO: 1184 - RNA, 23 nt, Artificial Sequence
  Description of Artificial Sequence: Synthetic oligonucleotide
aagcaguugugucaagcaugaca

SEQ ID NO: 1185 - RNA, 23 nt, Artificial Sequence
  Description of Artificial Sequence: Synthetic oligonucleotide
aagccacagcaguugugucaagc

SEQ ID NO: 1186 - RNA, 23 nt, Artificial Sequence
  Description of Artificial Sequence: Synthetic oligonucleotide
aaaagcaccaaccagccacagca

SEQ ID NO: 1187 - RNA, 23 nt, Artificial Sequence
  Description of Artificial Sequence: Synthetic oligonucleotide
aauaaacaaagcaccaaccagcc

SEQ ID NO: 1188 - RNA, 23 nt, Artificial Sequence
  Description of Artificial Sequence: Synthetic oligonucleotide
aacuaccauaaacaaagcaccaa

SEQ ID NO: 1189 - RNA, 23 nt, Artificial Sequence
  Description of Artificial Sequence: Synthetic oligonucleotide
aaaaacuacuaccauaaacaaag

SEQ ID NO: 1190 - RNA, 23 nt, Artificial Sequence
  Description of Artificial Sequence: Synthetic oligonucleotide
auuacagaaaaacuacuaccaua

SEQ ID NO: 1191 - RNA, 23 nt, Artificial Sequence
  Description of Artificial Sequence: Synthetic oligonucleotide
aucuguguuacagaaaaacuacu

SEQ ID NO: 1192 - RNA, 23 nt, Artificial Sequence
  Description of Artificial Sequence: Synthetic oligonucleotide
acuauauucuguguuacagaaaa

SEQ ID NO: 1193 - RNA, 23 nt, Artificial Sequence
  Description of Artificial Sequence: Synthetic oligonucleotide
auucuuauccuauauucuguguu

SEQ ID NO: 1194 - RNA, 23 nt, Artificial Sequence
  Description of Artificial Sequence: Synthetic oligonucleotide
aaagucaagguacuuuauucuua

SEQ ID NO: 1195 - RNA, 23 nt, Artificial Sequence
  Description of Artificial Sequence: Synthetic oligonucleotide
aaugcugugaacaaagucaaggu

SEQ ID NO: 1196 - RNA, 23 nt, Artificial Sequence
  Description of Artificial Sequence: Synthetic oligonucleotide
acccuacaugcugugaacaaagu

SEQ ID NO: 1197 - RNA, 23 nt, Artificial Sequence
  Description of Artificial Sequence: Synthetic oligonucleotide
aucaucacccuacaugcugugaa

SEQ ID NO: 1198 - RNA, 23 nt, Artificial Sequence
  Description of Artificial Sequence: Synthetic oligonucleotide
augugagugcucaucacccuaca

SEQ ID NO: 1199 - RNA, 23 nt, Artificial Sequence
  Description of Artificial Sequence: Synthetic oligonucleotide
aaacaauugugagugcucaucac

SEQ ID NO: 1200 - RNA, 23 nt, Artificial Sequence
  Description of Artificial Sequence: Synthetic oligonucleotide
auuuagucaacaauugugagugc

SEQ ID NO: 1201 - RNA, 23 nt, Artificial Sequence
  Description of Artificial Sequence: Synthetic oligonucleotide
aaaaagcagcauuuuagucaaca

SEQ ID NO: 1202 - RNA, 23 nt, Artificial Sequence
  Description of Artificial Sequence: Synthetic oligonucleotide
acuauguuuuaaaagcagcauuu

SEQ ID NO: 1203 - RNA, 23 nt, Artificial Sequence
  Description of Artificial Sequence: Synthetic oligonucleotide
aacuuuccuauguuuuaaaagca

SEQ ID NO: 1204 - RNA, 23 nt, Artificial Sequence
  Description of Artificial Sequence: Synthetic oligonucleotide
aaaccauucuacuuuccuauguu

SEQ ID NO: 1205 - RNA, 23 nt, Artificial Sequence
  Description of Artificial Sequence: Synthetic oligonucleotide
auugcacucaaccauucuacuuu

SEQ ID NO: 1206 - RNA, 23 nt, Artificial Sequence
  Description of Artificial Sequence: Synthetic oligonucleotide
aauggauuugcacucaaccauuc

SEQ ID NO: 1207 - RNA, 23 nt, Artificial Sequence
  Description of Artificial Sequence: Synthetic oligonucleotide
auugugcuauggauuugcacuca

SEQ ID NO: 1208 - RNA, 23 nt, Artificial Sequence
  Description of Artificial Sequence: Synthetic oligonucleotide
aaauuuaucuugugcuauggauu

SEQ ID NO: 1209 - RNA, 23 nt, Artificial Sequence
  Description of Artificial Sequence: Synthetic oligonucleotide
aaacuagcucaauuuaucuugug

SEQ ID NO: 1210 - RNA, 23 nt, Artificial Sequence
  Description of Artificial Sequence: Synthetic oligonucleotide
augauuugccuuaacuagcucaa

SEQ ID NO: 1211 - RNA, 23 nt, Artificial Sequence
  Description of Artificial Sequence: Synthetic oligonucleotide
aauuuuaccugauuugccuuaac

SEQ ID NO: 1212 - RNA, 23 nt, Artificial Sequence
  Description of Artificial Sequence: Synthetic oligonucleotide
agaaucaugacuauuuuaccuga

SEQ ID NO: 1213 - RNA, 23 nt, Artificial Sequence
  Description of Artificial Sequence: Synthetic oligonucleotide
aacauuacauagaaucaugacua

SEQ ID NO: 1214 - RNA, 23 nt, Artificial Sequence
  Description of Artificial Sequence: Synthetic oligonucleotide
auuucugguuuacauuacauaga

SEQ ID NO: 1215 - RNA, 23 nt, Artificial Sequence
  Description of Artificial Sequence: Synthetic oligonucleotide
aauaacaucuugaaaucaugaac

SEQ ID NO: 1216 - RNA, 23 nt, Artificial Sequence
  Description of Artificial Sequence: Synthetic oligonucleotide
aauaucucuguaauucaaaaguc

SEQ ID NO: 1217 - RNA, 23 nt, Artificial Sequence
  Description of Artificial Sequence: Synthetic oligonucleotide
aacucuguaucacaacucuaauu

SEQ ID NO: 1218 - RNA, 23 nt, Artificial Sequence
  Description of Artificial Sequence: Synthetic oligonucleotide
aaaauauacucuguaucacaacu

SEQ ID NO: 1219 - RNA, 23 nt, Artificial Sequence
  Description of Artificial Sequence: Synthetic oligonucleotide
agaauggaaauauacucuguauc

SEQ ID NO: 1220 - RNA, 23 nt, Artificial Sequence
  Description of Artificial Sequence: Synthetic oligonucleotide
auauugucugaauggaaauauac

SEQ ID NO: 1221 - RNA, 23 nt, Artificial Sequence
  Description of Artificial Sequence: Synthetic oligonucleotide
aguuaugauauauugucugaaug

SEQ ID NO: 1222 - RNA, 21 nt, Artificial Sequence
  Description of Artificial Sequence: Synthetic oligonucleotide
uguuuccuaugaucaagcaaa

SEQ ID NO: 1223 - RNA, 21 nt, Artificial Sequence
  Description of Artificial Sequence: Synthetic oligonucleotide
ugacuucacuaacuucgauca

SEQ ID NO: 1224 - RNA, 21 nt, Artificial Sequence
  Description of Artificial Sequence: Synthetic oligonucleotide
caaagcuuccuucaaauaaga

SEQ ID NO: 1225 - RNA, 21 nt, Artificial Sequence
  Description of Artificial Sequence: Synthetic oligonucleotide
ucaaagcuuccuucaaauaaa

SEQ ID NO: 1226 - RNA, 21 nt, Artificial Sequence
  Description of Artificial Sequence: Synthetic oligonucleotide
gucuguauccaaauaaugaaa

SEQ ID NO: 1227 - RNA, 21 nt, Artificial Sequence
  Description of Artificial Sequence: Synthetic oligonucleotide
auuccguaaacuuaacuucaa

SEQ ID NO: 1228 - RNA, 21 nt, Artificial Sequence
  Description of Artificial Sequence: Synthetic oligonucleotide
uccuaugaucaagcaacuuca

SEQ ID NO: 1229 - RNA, 21 nt, Artificial Sequence
  Description of Artificial Sequence: Synthetic oligonucleotide
guuuccuaugaucaagcaaca

SEQ ID NO: 1230 - RNA, 21 nt, Artificial Sequence
  Description of Artificial Sequence: Synthetic oligonucleotide
augcugcuuuuaaaacauaga

SEQ ID NO: 1231 - RNA, 21 nt, Artificial Sequence
  Description of Artificial Sequence: Synthetic oligonucleotide
cauucagacaauauaucauaa

SEQ ID NO: 1232 - RNA, 21 nt, Artificial Sequence
  Description of Artificial Sequence: Synthetic oligonucleotide
gacuucacuaacuucgaucca

SEQ ID NO: 1233 - RNA, 21 nt, Artificial Sequence
  Description of Artificial Sequence: Synthetic oligonucleotide
ccauucagacaauauaucaua

SEQ ID NO: 1234 - RNA, 21 nt, Artificial Sequence
  Description of Artificial Sequence: Synthetic oligonucleotide
ucuguauccaaauaaugaaua

SEQ ID NO: 1235 - RNA, 21 nt, Artificial Sequence
  Description of Artificial Sequence: Synthetic oligonucleotide
aaucaaagcuuccuucaaaua

SEQ ID NO: 1236 - RNA, 21 nt, Artificial Sequence
  Description of Artificial Sequence: Synthetic oligonucleotide
auucagacaauauaucauaaa

SEQ ID NO: 1237 - RNA, 21 nt, Artificial Sequence
  Description of Artificial Sequence: Synthetic oligonucleotide
ccguaaacuuaacuucaauga

SEQ ID NO: 1238 - RNA, 21 nt, Artificial Sequence
  Description of Artificial Sequence: Synthetic oligonucleotide
gugcugacuucacuaacuuca

SEQ ID NO: 1239 - RNA, 21 nt, Artificial Sequence
  Description of Artificial Sequence: Synthetic oligonucleotide
aagcuuccuucaaauaagaua

SEQ ID NO: 1240 - RNA, 21 nt, Artificial Sequence
  Description of Artificial Sequence: Synthetic oligonucleotide
aaauuccguaaacuuaacuua

SEQ ID NO: 1241 - RNA, 21 nt, Artificial Sequence
  Description of Artificial Sequence: Synthetic oligonucleotide
cugucuguuuccuaugaucaa

SEQ ID NO: 1242 - RNA, 21 nt, Artificial Sequence
  Description of Artificial Sequence: Synthetic oligonucleotide
guauccaaauaaugaaucuua

SEQ ID NO: 1243 - RNA, 21 nt, Artificial Sequence
  Description of Artificial Sequence: Synthetic oligonucleotide
cugacuucacuaacuucgaua

SEQ ID NO: 1244 - RNA, 21 nt, Artificial Sequence
  Description of Artificial Sequence: Synthetic oligonucleotide
gcuuccuucaaauaagaugga

SEQ ID NO: 1245 - RNA, 21 nt, Artificial Sequence
  Description of Artificial Sequence: Synthetic oligonucleotide
aaaucaaagcuuccuucaaaa

SEQ ID NO: 1246 - RNA, 21 nt, Artificial Sequence
  Description of Artificial Sequence: Synthetic oligonucleotide
agcuuccuucaaauaagauga

SEQ ID NO: 1247 - RNA, 21 nt, Artificial Sequence
  Description of Artificial Sequence: Synthetic oligonucleotide
ugcugcuuuuaaaacauagga

SEQ ID NO: 1248 - RNA, 21 nt, Artificial Sequence
  Description of Artificial Sequence: Synthetic oligonucleotide
aggcaaaucaaagcuuccuua

SEQ ID NO: 1249 - RNA, 21 nt, Artificial Sequence
  Description of Artificial Sequence: Synthetic oligonucleotide
ggcaaaucaaagcuuccuuca

SEQ ID NO: 1250 - RNA, 21 nt, Artificial Sequence
  Description of Artificial Sequence: Synthetic oligonucleotide
aaagcuuccuucaaauaagaa

SEQ ID NO: 1251 - RNA, 21 nt, Artificial Sequence
  Description of Artificial Sequence: Synthetic oligonucleotide
uaaaaugcugcuuuuaaaaca

SEQ ID NO: 1252 - RNA, 21 nt, Artificial Sequence
  Description of Artificial Sequence: Synthetic oligonucleotide
aagaauaaaguaccuugacua

SEQ ID NO: 1253 - RNA, 21 nt, Artificial Sequence
  Description of Artificial Sequence: Synthetic oligonucleotide
agaauaaaguaccuugacuua

SEQ ID NO: 1254 - RNA, 21 nt, Artificial Sequence
  Description of Artificial Sequence: Synthetic oligonucleotide
gucuguuuccuaugaucaaga

SEQ ID NO: 1255 - RNA, 21 nt, Artificial Sequence
  Description of Artificial Sequence: Synthetic oligonucleotide
uccguaaacuuaacuucaaua

SEQ ID NO: 1256 - RNA, 21 nt, Artificial Sequence
  Description of Artificial Sequence: Synthetic oligonucleotide
ccucuucuggaaugugugaca

SEQ ID NO: 1257 - RNA, 21 nt, Artificial Sequence
  Description of Artificial Sequence: Synthetic oligonucleotide
uauccaaauaaugaaucuuca

SEQ ID NO: 1258 - RNA, 21 nt, Artificial Sequence
  Description of Artificial Sequence: Synthetic oligonucleotide
ucuguuuccuaugaucaagca

SEQ ID NO: 1259 - RNA, 21 nt, Artificial Sequence
  Description of Artificial Sequence: Synthetic oligonucleotide
guugacaucgacacucauaca

SEQ ID NO: 1260 - RNA, 21 nt, Artificial Sequence
  Description of Artificial Sequence: Synthetic oligonucleotide
aaguaccuugacuuuguucaa

SEQ ID NO: 1261 - RNA, 21 nt, Artificial Sequence
  Description of Artificial Sequence: Synthetic oligonucleotide
cagaucuaccuuggugauuua

SEQ ID NO: 1262 - RNA, 21 nt, Artificial Sequence
  Description of Artificial Sequence: Synthetic oligonucleotide
cuggauugugcucaaggaaca

SEQ ID NO: 1263 - RNA, 21 nt, Artificial Sequence
  Description of Artificial Sequence: Synthetic oligonucleotide
ugcuuuuaaaacauaggaaaa

SEQ ID NO: 1264 - RNA, 21 nt, Artificial Sequence
  Description of Artificial Sequence: Synthetic oligonucleotide
ugcugacuucacuaacuucga

SEQ ID NO: 1265 - RNA, 21 nt, Artificial Sequence
  Description of Artificial Sequence: Synthetic oligonucleotide
gaaauuccguaaacuuaacua

SEQ ID NO: 1266 - RNA, 21 nt, Artificial Sequence
  Description of Artificial Sequence: Synthetic oligonucleotide
uaaggcaaaucagguaaaaua

SEQ ID NO: 1267 - RNA, 21 nt, Artificial Sequence
  Description of Artificial Sequence: Synthetic oligonucleotide
guucuagguauuuuuuugaaa

SEQ ID NO: 1268 - RNA, 21 nt, Artificial Sequence
  Description of Artificial Sequence: Synthetic oligonucleotide
aagauaaauugagcuaguuaa

SEQ ID NO: 1269 - RNA, 21 nt, Artificial Sequence
  Description of Artificial Sequence: Synthetic oligonucleotide
uuagcuaagcacagaucuaca

SEQ ID NO: 1270 - RNA, 21 nt, Artificial Sequence
  Description of Artificial Sequence: Synthetic oligonucleotide
cuucacuaacuucgauccuca

SEQ ID NO: 1271 - RNA, 21 nt, Artificial Sequence
  Description of Artificial Sequence: Synthetic oligonucleotide
aauuccguaaacuuaacuuca

SEQ ID NO: 1272 - RNA, 21 nt, Artificial Sequence
  Description of Artificial Sequence: Synthetic oligonucleotide
cugcuuuuaaaacauaggaaa

SEQ ID NO: 1273 - RNA, 21 nt, Artificial Sequence
  Description of Artificial Sequence: Synthetic oligonucleotide
cuguugacaucgacacucaua

SEQ ID NO: 1274 - RNA, 21 nt, Artificial Sequence
  Description of Artificial Sequence: Synthetic oligonucleotide
uucacuaacuucgauccucga

SEQ ID NO: 1275 - RNA, 21 nt, Artificial Sequence
  Description of Artificial Sequence: Synthetic oligonucleotide
gcuaagcacagaucuaccuua

SEQ ID NO: 1276 - RNA, 21 nt, Artificial Sequence
  Description of Artificial Sequence: Synthetic oligonucleotide
uaaaguaccuugacuuuguua

SEQ ID NO: 1277 - RNA, 21 nt, Artificial Sequence
  Description of Artificial Sequence: Synthetic oligonucleotide
aaaaugcugcuuuuaaaacaa

SEQ ID NO: 1278 - RNA, 21 nt, Artificial Sequence
  Description of Artificial Sequence: Synthetic oligonucleotide
gcugcuuuuaaaacauaggaa

SEQ ID NO: 1279 - RNA, 21 nt, Artificial Sequence
  Description of Artificial Sequence: Synthetic oligonucleotide
ucaugauucuauguaauguaa

SEQ ID NO: 1280 - RNA, 21 nt, Artificial Sequence
  Description of Artificial Sequence: Synthetic oligonucleotide
agugcugacuucacuaacuua

SEQ ID NO: 1281 - RNA, 21 nt, Artificial Sequence
  Description of Artificial Sequence: Synthetic oligonucleotide
cuaagcacagaucuaccuuga

SEQ ID NO: 1282 - RNA, 21 nt, Artificial Sequence
  Description of Artificial Sequence: Synthetic oligonucleotide
cacuaacuucgauccucguga

SEQ ID NO: 1283 - RNA, 21 nt, Artificial Sequence
  Description of Artificial Sequence: Synthetic oligonucleotide
cugaagaacaggcaaaucaaa

SEQ ID NO: 1284 - RNA, 21 nt, Artificial Sequence
  Description of Artificial Sequence: Synthetic oligonucleotide
aaaguaccuugacuuuguuca

SEQ ID NO: 1285 - RNA, 21 nt, Artificial Sequence
  Description of Artificial Sequence: Synthetic oligonucleotide
gcuuuguuuaugguaguagua

SEQ ID NO: 1286 - RNA, 21 nt, Artificial Sequence
  Description of Artificial Sequence: Synthetic oligonucleotide
caugauucuauguaauguaaa

SEQ ID NO: 1287 - RNA, 21 nt, Artificial Sequence
  Description of Artificial Sequence: Synthetic oligonucleotide
cguucuagguauuuuuuugaa

SEQ ID NO: 1288 - RNA, 21 nt, Artificial Sequence
  Description of Artificial Sequence: Synthetic oligonucleotide
uucuagguauuuuuuugaaga

SEQ ID NO: 1289 - RNA, 21 nt, Artificial Sequence
  Description of Artificial Sequence: Synthetic oligonucleotide
uccuuccugaauccuuggaua

SEQ ID NO: 1290 - RNA, 21 nt, Artificial Sequence
  Description of Artificial Sequence: Synthetic oligonucleotide
gacuaaaaugcugcuuuuaaa

SEQ ID NO: 1291 - RNA, 21 nt, Artificial Sequence
  Description of Artificial Sequence: Synthetic oligonucleotide
aacaggcaaaucaaagcuuca

SEQ ID NO: 1292 - RNA, 21 nt, Artificial Sequence
  Description of Artificial Sequence: Synthetic oligonucleotide
ccuuccugaauccuuggauua

SEQ ID NO: 1293 - RNA, 21 nt, Artificial Sequence
  Description of Artificial Sequence: Synthetic oligonucleotide
ugaugacucucaggacaaaga

SEQ ID NO: 1294 - RNA, 21 nt, Artificial Sequence
  Description of Artificial Sequence: Synthetic oligonucleotide
uggaguuugaugacucucaga

SEQ ID NO: 1295 - RNA, 21 nt, Artificial Sequence
  Description of Artificial Sequence: Synthetic oligonucleotide
auccaaauaaugaaucuucga

SEQ ID NO: 1296 - RNA, 21 nt, Artificial Sequence
  Description of Artificial Sequence: Synthetic oligonucleotide
uugacuuuguucacagcauga

SEQ ID NO: 1297 - RNA, 21 nt, Artificial Sequence
  Description of Artificial Sequence: Synthetic oligonucleotide
agaucuaccuuggugauuuga

SEQ ID NO: 1298 - RNA, 21 nt, Artificial Sequence
  Description of Artificial Sequence: Synthetic oligonucleotide
augguaguaguuuuucuguaa

SEQ ID NO: 1299 - RNA, 21 nt, Artificial Sequence
  Description of Artificial Sequence: Synthetic oligonucleotide
ccuugacuuuguucacagcaa

SEQ ID NO: 1300 - RNA, 21 nt, Artificial Sequence
  Description of Artificial Sequence: Synthetic oligonucleotide
ccuggauugugcucaaggaaa

SEQ ID NO: 1301 - RNA, 21 nt, Artificial Sequence
  Description of Artificial Sequence: Synthetic oligonucleotide
gagcuaguuaaggcaaaucaa

SEQ ID NO: 1302 - RNA, 21 nt, Artificial Sequence
  Description of Artificial Sequence: Synthetic oligonucleotide
acugaagaacaggcaaaucaa

SEQ ID NO: 1303 - RNA, 21 nt, Artificial Sequence
  Description of Artificial Sequence: Synthetic oligonucleotide
ugaagaacaggcaaaucaaaa

SEQ ID NO: 1304 - RNA, 21 nt, Artificial Sequence
  Description of Artificial Sequence: Synthetic oligonucleotide
cuccucuucuggaauguguga

SEQ ID NO: 1305 - RNA, 21 nt, Artificial Sequence
  Description of Artificial Sequence: Synthetic oligonucleotide
gcuuucaacguggaguuugaa

SEQ ID NO: 1306 - RNA, 21 nt, Artificial Sequence
  Description of Artificial Sequence: Synthetic oligonucleotide
ugcuuucaacguggaguuuga

SEQ ID NO: 1307 - RNA, 21 nt, Artificial Sequence
  Description of Artificial Sequence: Synthetic oligonucleotide
cagguaaaauagucaugauua

SEQ ID NO: 1308 - RNA, 21 nt, Artificial Sequence
  Description of Artificial Sequence: Synthetic oligonucleotide
cuguauccaaauaaugaauca

SEQ ID NO: 1309 - RNA, 21 nt, Artificial Sequence
  Description of Artificial Sequence: Synthetic oligonucleotide
aaggcaaaucagguaaaauaa

SEQ ID NO: 1310 - RNA, 21 nt, Artificial Sequence
  Description of Artificial Sequence: Synthetic oligonucleotide
ccuccuuccugaauccuugga

SEQ ID NO: 1311 - RNA, 21 nt, Artificial Sequence
  Description of Artificial Sequence: Synthetic oligonucleotide
uuccuucaaauaagaugguca

SEQ ID NO: 1312 - RNA, 21 nt, Artificial Sequence
  Description of Artificial Sequence: Synthetic oligonucleotide
uugaaauuccguaaacuuaaa

SEQ ID NO: 1313 - RNA, 21 nt, Artificial Sequence
  Description of Artificial Sequence: Synthetic oligonucleotide
acacucauacagccaaguaua

SEQ ID NO: 1314 - RNA, 21 nt, Artificial Sequence
  Description of Artificial Sequence: Synthetic oligonucleotide
gcacagaucuaccuuggugaa

SEQ ID NO: 1315 - RNA, 21 nt, Artificial Sequence
  Description of Artificial Sequence: Synthetic oligonucleotide
cuuucaacguggaguuugaua

SEQ ID NO: 1316 - RNA, 21 nt, Artificial Sequence
  Description of Artificial Sequence: Synthetic oligonucleotide
uagcuaagcacagaucuacca

SEQ ID NO: 1317 - RNA, 21 nt, Artificial Sequence
  Description of Artificial Sequence: Synthetic oligonucleotide
uugugauacagaguauauuua

SEQ ID NO: 1318 - RNA, 21 nt, Artificial Sequence
  Description of Artificial Sequence: Synthetic oligonucleotide
acucauacagccaaguaugaa

SEQ ID NO: 1319 - RNA, 21 nt, Artificial Sequence
  Description of Artificial Sequence: Synthetic oligonucleotide
aguuaaggcaaaucagguaaa

SEQ ID NO: 1320 - RNA, 21 nt, Artificial Sequence
  Description of Artificial Sequence: Synthetic oligonucleotide
guugugauacagaguauauua

SEQ ID NO: 1321 - RNA, 21 nt, Artificial Sequence
  Description of Artificial Sequence: Synthetic oligonucleotide
ugacaucgacacucauacaga

SEQ ID NO: 1322 - RNA, 21 nt, Artificial Sequence
  Description of Artificial Sequence: Synthetic oligonucleotide
agauaaauugagcuaguuaaa

SEQ ID NO: 1323 - RNA, 21 nt, Artificial Sequence
  Description of Artificial Sequence: Synthetic oligonucleotide
uagguauuuuuuugaagguua

SEQ ID NO: 1324 - RNA, 21 nt, Artificial Sequence
  Description of Artificial Sequence: Synthetic oligonucleotide
uagguauuuuuuugaagguua

SEQ ID NO: 1325 - RNA, 21 nt, Artificial Sequence
  Description of Artificial Sequence: Synthetic oligonucleotide
uggugcuuuguuuaugguaga

SEQ ID NO: 1326 - RNA, 21 nt, Artificial Sequence
  Description of Artificial Sequence: Synthetic oligonucleotide
ugugauacagaguauauuuca

SEQ ID NO: 1327 - RNA, 21 nt, Artificial Sequence
  Description of Artificial Sequence: Synthetic oligonucleotide
ucuucuggaaugugugaccua

SEQ ID NO: 1328 - RNA, 21 nt, Artificial Sequence
  Description of Artificial Sequence: Synthetic oligonucleotide
cuggccguucuagguauuuua

SEQ ID NO: 1329 - RNA, 21 nt, Artificial Sequence
  Description of Artificial Sequence: Synthetic oligonucleotide
aucagguaaaauagucaugaa

SEQ ID NO: 1330 - RNA, 21 nt, Artificial Sequence
  Description of Artificial Sequence: Synthetic oligonucleotide
uuccauuaaaacaaagggcaa

SEQ ID NO: 1331 - RNA, 21 nt, Artificial Sequence
  Description of Artificial Sequence: Synthetic oligonucleotide
caagagugcugacuucacuaa

SEQ ID NO: 1332 - RNA, 21 nt, Artificial Sequence
  Description of Artificial Sequence: Synthetic oligonucleotide
uuucaacguggaguuugauga

SEQ ID NO: 1333 - RNA, 21 nt, Artificial Sequence
  Description of Artificial Sequence: Synthetic oligonucleotide
uuggugcuuuguuuaugguaa

SEQ ID NO: 1334 - RNA, 21 nt, Artificial Sequence
  Description of Artificial Sequence: Synthetic oligonucleotide
cacucauacagccaaguauga

SEQ ID NO: 1335 - RNA, 21 nt, Artificial Sequence
  Description of Artificial Sequence: Synthetic oligonucleotide
auaaaguaccuugacuuugua

SEQ ID NO: 1336 - RNA, 21 nt, Artificial Sequence
  Description of Artificial Sequence: Synthetic oligonucleotide
augacuuuugaauuacagaga

SEQ ID NO: 1337 - RNA, 21 nt, Artificial Sequence
  Description of Artificial Sequence: Synthetic oligonucleotide
gucaugauucuauguaaugua

SEQ ID NO: 1338 - RNA, 21 nt, Artificial Sequence
  Description of Artificial Sequence: Synthetic oligonucleotide
gaccuggauugugcucaagga

SEQ ID NO: 1339 - RNA, 21 nt, Artificial Sequence
  Description of Artificial Sequence: Synthetic oligonucleotide
gacaucgacacucauacagca

SEQ ID NO: 1340 - RNA, 21 nt, Artificial Sequence
  Description of Artificial Sequence: Synthetic oligonucleotide
gaagaacaggcaaaucaaaga

SEQ ID NO: 1341 - RNA, 21 nt, Artificial Sequence
  Description of Artificial Sequence: Synthetic oligonucleotide
cguaaacuuaacuucaaugga

SEQ ID NO: 1342 - RNA, 21 nt, Artificial Sequence
  Description of Artificial Sequence: Synthetic oligonucleotide
agguaaaauagucaugauuca

SEQ ID NO: 1343 - RNA, 21 nt, Artificial Sequence
  Description of Artificial Sequence: Synthetic oligonucleotide
guaccuugacuuuguucacaa

SEQ ID NO: 1344 - RNA, 21 nt, Artificial Sequence
  Description of Artificial Sequence: Synthetic oligonucleotide
ccguucuagguauuuuuuuga

SEQ ID NO: 1345 - RNA, 21 nt, Artificial Sequence
  Description of Artificial Sequence: Synthetic oligonucleotide
uuuaugguaguaguuuuucua

SEQ ID NO: 1346 - RNA, 21 nt, Artificial Sequence
  Description of Artificial Sequence: Synthetic oligonucleotide
cguggaguuugaugacucuca

SEQ ID NO: 1347 - RNA, 21 nt, Artificial Sequence
  Description of Artificial Sequence: Synthetic oligonucleotide
uucaacguggaguuugaugaa

SEQ ID NO: 1348 - RNA, 21 nt, Artificial Sequence
  Description of Artificial Sequence: Synthetic oligonucleotide
gaguugugauacagaguauaa

SEQ ID NO: 1349 - RNA, 21 nt, Artificial Sequence
  Description of Artificial Sequence: Synthetic oligonucleotide
uaccuugacuuuguucacaga

SEQ ID NO: 1350 - RNA, 21 nt, Artificial Sequence
  Description of Artificial Sequence: Synthetic oligonucleotide
uagaguugugauacagaguaa

SEQ ID NO: 1351 - RNA, 21 nt, Artificial Sequence
  Description of Artificial Sequence: Synthetic oligonucleotide
ugagugcaaauccauagcaca

SEQ ID NO: 1352 - RNA, 21 nt, Artificial Sequence
  Description of Artificial Sequence: Synthetic oligonucleotide
caaaucagguaaaauagucaa

SEQ ID NO: 1353 - RNA, 21 nt, Artificial Sequence
  Description of Artificial Sequence: Synthetic oligonucleotide
aagcacagaucuaccuuggua

SEQ ID NO: 1354 - RNA, 21 nt, Artificial Sequence
  Description of Artificial Sequence: Synthetic oligonucleotide
acuuuguucacagcauguaga

SEQ ID NO: 1355 - RNA, 21 nt, Artificial Sequence
  Description of Artificial Sequence: Synthetic oligonucleotide
uggccguucuagguauuuuua

SEQ ID NO: 1356 - RNA, 21 nt, Artificial Sequence
  Description of Artificial Sequence: Synthetic oligonucleotide
gccaaguaugacccuucccua

SEQ ID NO: 1357 - RNA, 21 nt, Artificial Sequence
  Description of Artificial Sequence: Synthetic oligonucleotide
uaugguaguaguuuuucugua

SEQ ID NO: 1358 - RNA, 21 nt, Artificial Sequence
  Description of Artificial Sequence: Synthetic oligonucleotide
aauugagcuaguuaaggcaaa

SEQ ID NO: 1359 - RNA, 21 nt, Artificial Sequence
  Description of Artificial Sequence: Synthetic oligonucleotide
acuaaaaugcugcuuuuaaaa

SEQ ID NO: 1360 - RNA, 21 nt, Artificial Sequence
  Description of Artificial Sequence: Synthetic oligonucleotide
acuucacuugguucacuggaa

SEQ ID NO: 1361 - RNA, 21 nt, Artificial Sequence
  Description of Artificial Sequence: Synthetic oligonucleotide
ucuagguauuuuuuugaagga

SEQ ID NO: 1362 - RNA, 21 nt, Artificial Sequence
  Description of Artificial Sequence: Synthetic oligonucleotide
agcacagaucuaccuugguga

SEQ ID NO: 1363 - RNA, 21 nt, Artificial Sequence
  Description of Artificial Sequence: Synthetic oligonucleotide
gccguucuagguauuuuuuua

SEQ ID NO: 1364 - RNA, 21 nt, Artificial Sequence
  Description of Artificial Sequence: Synthetic oligonucleotide
cuaaaaugcugcuuuuaaaaa

SEQ ID NO: 1365 - RNA, 21 nt, Artificial Sequence
  Description of Artificial Sequence: Synthetic oligonucleotide
gaacaggcaaaucaaagcuua

SEQ ID NO: 1366 - RNA, 21 nt, Artificial Sequence
  Description of Artificial Sequence: Synthetic oligonucleotide
ugcuuuguuuaugguaguaga

SEQ ID NO: 1367 - RNA, 21 nt, Artificial Sequence
  Description of Artificial Sequence: Synthetic oligonucleotide
aauuagaguugugauacagaa

SEQ ID NO: 1368 - RNA, 21 nt, Artificial Sequence
  Description of Artificial Sequence: Synthetic oligonucleotide
cugguuggugcuuuguuuaua

SEQ ID NO: 1369 - RNA, 21 nt, Artificial Sequence
  Description of Artificial Sequence: Synthetic oligonucleotide
uccuucaaauaagauggucca

SEQ ID NO: 1370 - RNA, 21 nt, Artificial Sequence
  Description of Artificial Sequence: Synthetic oligonucleotide
gccuccuuccugaauccuuga

SEQ ID NO: 1371 - RNA, 21 nt, Artificial Sequence
  Description of Artificial Sequence: Synthetic oligonucleotide
gauucuauguaauguaaacca

SEQ ID NO: 1372 - RNA, 21 nt, Artificial Sequence
  Description of Artificial Sequence: Synthetic oligonucleotide
ugguuggugcuuuguuuauga

SEQ ID NO: 1373 - RNA, 21 nt, Artificial Sequence
  Description of Artificial Sequence: Synthetic oligonucleotide
cucauacagccaaguaugaca

SEQ ID NO: 1374 - RNA, 21 nt, Artificial Sequence
  Description of Artificial Sequence: Synthetic oligonucleotide
aucgacacucauacagccaaa

SEQ ID NO: 1375 - RNA, 21 nt, Artificial Sequence
  Description of Artificial Sequence: Synthetic oligonucleotide
gcacuggcauaaggacuucca

SEQ ID NO: 1376 - RNA, 21 nt, Artificial Sequence
  Description of Artificial Sequence: Synthetic oligonucleotide
aacguggaguuugaugacuca

SEQ ID NO: 1377 - RNA, 21 nt, Artificial Sequence
  Description of Artificial Sequence: Synthetic oligonucleotide
gcaaaucagguaaaauaguca

SEQ ID NO: 1378 - RNA, 21 nt, Artificial Sequence
  Description of Artificial Sequence: Synthetic oligonucleotide
cuucagaaaguuguugaugua

SEQ ID NO: 1379 - RNA, 21 nt, Artificial Sequence
  Description of Artificial Sequence: Synthetic oligonucleotide
aaaucagguaaaauagucaua

SEQ ID NO: 1380 - RNA, 21 nt, Artificial Sequence
  Description of Artificial Sequence: Synthetic oligonucleotide
aggcaaaucagguaaaauaga

SEQ ID NO: 1381 - RNA, 21 nt, Artificial Sequence
  Description of Artificial Sequence: Synthetic oligonucleotide
gggcaagagugcugacuucaa

SEQ ID NO: 1382 - RNA, 21 nt, Artificial Sequence
  Description of Artificial Sequence: Synthetic oligonucleotide
ggccguucuagguauuuuuua

SEQ ID NO: 1383 - RNA, 21 nt, Artificial Sequence
  Description of Artificial Sequence: Synthetic oligonucleotide
cgggccuucagaaaguuguua

SEQ ID NO: 1384 - RNA, 21 nt, Artificial Sequence
  Description of Artificial Sequence: Synthetic oligonucleotide
ggcaaaucagguaaaauagua

SEQ ID NO: 1385 - RNA, 21 nt, Artificial Sequence
  Description of Artificial Sequence: Synthetic oligonucleotide
gaggauccucaacaaugguca

SEQ ID NO: 1386 - RNA, 21 nt, Artificial Sequence
  Description of Artificial Sequence: Synthetic oligonucleotide
uucacuugguucacuggaaca

SEQ ID NO: 1387 - RNA, 21 nt, Artificial Sequence
  Description of Artificial Sequence: Synthetic oligonucleotide
agaacugaugguggacaacua

SEQ ID NO: 1388 - RNA, 21 nt, Artificial Sequence
  Description of Artificial Sequence: Synthetic oligonucleotide
aauaaaguaccuugacuuuga

SEQ ID NO: 1389 - RNA, 21 nt, Artificial Sequence
  Description of Artificial Sequence: Synthetic oligonucleotide
cuuuguucacagcauguagga

SEQ ID NO: 1390 - RNA, 21 nt, Artificial Sequence
  Description of Artificial Sequence: Synthetic oligonucleotide
aauaagaauaaaguaccuuga

SEQ ID NO: 1391 - RNA, 21 nt, Artificial Sequence
  Description of Artificial Sequence: Synthetic oligonucleotide
aguaguuuuucuguaacacaa

SEQ ID NO: 1392 - RNA, 21 nt, Artificial Sequence
  Description of Artificial Sequence: Synthetic oligonucleotide
ccaaguaugacccuucccuga

SEQ ID NO: 1393 - RNA, 21 nt, Artificial Sequence
  Description of Artificial Sequence: Synthetic oligonucleotide
uugagugcaaauccauagcaa

SEQ ID NO: 1394 - RNA, 21 nt, Artificial Sequence
  Description of Artificial Sequence: Synthetic oligonucleotide
ggccuucagaaaguuguugaa

SEQ ID NO: 1395 - RNA, 21 nt, Artificial Sequence
  Description of Artificial Sequence: Synthetic oligonucleotide
aggauccucaacaauggucaa

SEQ ID NO: 1396 - RNA, 21 nt, Artificial Sequence
  Description of Artificial Sequence: Synthetic oligonucleotide
auuagaguugugauacagaga

SEQ ID NO: 1397 - RNA, 21 nt, Artificial Sequence
  Description of Artificial Sequence: Synthetic oligonucleotide
caacguggaguuugaugacua

SEQ ID NO: 1398 - RNA, 21 nt, Artificial Sequence
  Description of Artificial Sequence: Synthetic oligonucleotide
gacuuuugaauuacagagaua

SEQ ID NO: 1399 - RNA, 21 nt, Artificial Sequence
  Description of Artificial Sequence: Synthetic oligonucleotide
ugaggauccucaacaauggua

SEQ ID NO: 1400 - RNA, 21 nt, Artificial Sequence
  Description of Artificial Sequence: Synthetic oligonucleotide
gaguuugaugacucucaggaa

SEQ ID NO: 1401 - RNA, 21 nt, Artificial Sequence
  Description of Artificial Sequence: Synthetic oligonucleotide
uuuuaaaacauaggaaaguaa

SEQ ID NO: 1402 - RNA, 21 nt, Artificial Sequence
  Description of Artificial Sequence: Synthetic oligonucleotide
uuaugguaguaguuuuucuga

SEQ ID NO: 1403 - RNA, 21 nt, Artificial Sequence
  Description of Artificial Sequence: Synthetic oligonucleotide
aacuucacuugguucacugga

SEQ ID NO: 1404 - RNA, 21 nt, Artificial Sequence
  Description of Artificial Sequence: Synthetic oligonucleotide
aaauugagcuaguuaaggcaa

SEQ ID NO: 1405 - RNA, 21 nt, Artificial Sequence
  Description of Artificial Sequence: Synthetic oligonucleotide
uuuguuuaugguaguaguuua

SEQ ID NO: 1406 - RNA, 21 nt, Artificial Sequence
  Description of Artificial Sequence: Synthetic oligonucleotide
aagggcaagagugcugacuua

SEQ ID NO: 1407 - RNA, 21 nt, Artificial Sequence
  Description of Artificial Sequence: Synthetic oligonucleotide
ggaguuugaugacucucagga

SEQ ID NO: 1408 - RNA, 21 nt, Artificial Sequence
  Description of Artificial Sequence: Synthetic oligonucleotide
gggccuucagaaaguuguuga

SEQ ID NO: 1409 - RNA, 21 nt, Artificial Sequence
  Description of Artificial Sequence: Synthetic oligonucleotide
gcaagagugcugacuucacua

SEQ ID NO: 1410 - RNA, 21 nt, Artificial Sequence
  Description of Artificial Sequence: Synthetic oligonucleotide
agccacugaagaacaggcaaa

SEQ ID NO: 1411 - RNA, 21 nt, Artificial Sequence
  Description of Artificial Sequence: Synthetic oligonucleotide
auuccauuaaaacaaagggca

SEQ ID NO: 1412 - RNA, 21 nt, Artificial Sequence
  Description of Artificial Sequence: Synthetic oligonucleotide
guaguuuuucuguaacacaga

SEQ ID NO: 1413 - RNA, 21 nt, Artificial Sequence
  Description of Artificial Sequence: Synthetic oligonucleotide
gguauuuuuuugaagguugga

SEQ ID NO: 1414 - RNA, 21 nt, Artificial Sequence
  Description of Artificial Sequence: Synthetic oligonucleotide
uccaaauaaugaaucuucgga

SEQ ID NO: 1415 - RNA, 21 nt, Artificial Sequence
  Description of Artificial Sequence: Synthetic oligonucleotide
aaacauaggaaaguagaauga

SEQ ID NO: 1416 - RNA, 21 nt, Artificial Sequence
  Description of Artificial Sequence: Synthetic oligonucleotide
augacucucaggacaaagcaa

SEQ ID NO: 1417 - RNA, 21 nt, Artificial Sequence
  Description of Artificial Sequence: Synthetic oligonucleotide
agcuaguuaaggcaaaucaga

SEQ ID NO: 1418 - RNA, 21 nt, Artificial Sequence
  Description of Artificial Sequence: Synthetic oligonucleotide
ccugaggauccucaacaauga

SEQ ID NO: 1419 - RNA, 21 nt, Artificial Sequence
  Description of Artificial Sequence: Synthetic oligonucleotide
gguuggugcuuuguuuaugga

SEQ ID NO: 1420 - RNA, 21 nt, Artificial Sequence
  Description of Artificial Sequence: Synthetic oligonucleotide
agguauuuuuuugaagguuga

SEQ ID NO: 1421 - RNA, 21 nt, Artificial Sequence
  Description of Artificial Sequence: Synthetic oligonucleotide
ugaaucuucggguguuuccca

SEQ ID NO: 1422 - RNA, 21 nt, Artificial Sequence
  Description of Artificial Sequence: Synthetic oligonucleotide
uaguaguuuuucuguaacaca

SEQ ID NO: 1423 - RNA, 21 nt, Artificial Sequence
  Description of Artificial Sequence: Synthetic oligonucleotide
guuugaugacucucaggacaa

SEQ ID NO: 1424 - RNA, 21 nt, Artificial Sequence
  Description of Artificial Sequence: Synthetic oligonucleotide
aaugaaucuucggguguuuca

SEQ ID NO: 1425 - RNA, 21 nt, Artificial Sequence
  Description of Artificial Sequence: Synthetic oligonucleotide
caaauaaugaaucuucgggua

SEQ ID NO: 1426 - RNA, 21 nt, Artificial Sequence
  Description of Artificial Sequence: Synthetic oligonucleotide
uuuguucacagcauguaggga

SEQ ID NO: 1427 - RNA, 21 nt, Artificial Sequence
  Description of Artificial Sequence: Synthetic oligonucleotide
auugugcucaaggaacccaua

SEQ ID NO: 1428 - RNA, 21 nt, Artificial Sequence
  Description of Artificial Sequence: Synthetic oligonucleotide
guuggugcuuuguuuauggua

SEQ ID NO: 1429 - RNA, 21 nt, Artificial Sequence
  Description of Artificial Sequence: Synthetic oligonucleotide
gaaucuucggguguuucccua

SEQ ID NO: 1430 - RNA, 21 nt, Artificial Sequence
  Description of Artificial Sequence: Synthetic oligonucleotide
gguaguaguuuuucuguaaca

SEQ ID NO: 1431 - RNA, 21 nt, Artificial Sequence
  Description of Artificial Sequence: Synthetic oligonucleotide
agaacaggcaaaucaaagcua

SEQ ID NO: 1432 - RNA, 21 nt, Artificial Sequence
  Description of Artificial Sequence: Synthetic oligonucleotide
aaaauagucaugauucuauga

SEQ ID NO: 1433 - RNA, 21 nt, Artificial Sequence
  Description of Artificial Sequence: Synthetic oligonucleotide
acuggccguucuagguauuua

SEQ ID NO: 1434 - RNA, 21 nt, Artificial Sequence
  Description of Artificial Sequence: Synthetic oligonucleotide
cccugaggauccucaacaaua

SEQ ID NO: 1435 - RNA, 21 nt, Artificial Sequence
  Description of Artificial Sequence: Synthetic oligonucleotide
gcugguuggugcuuuguuuaa

SEQ ID NO: 1436 - RNA, 21 nt, Artificial Sequence
  Description of Artificial Sequence: Synthetic oligonucleotide
cagaaaguuguugaugugcua

SEQ ID NO: 1437 - RNA, 21 nt, Artificial Sequence
  Description of Artificial Sequence: Synthetic oligonucleotide
acuaacuucgauccucgugga

SEQ ID NO: 1438 - RNA, 21 nt, Artificial Sequence
  Description of Artificial Sequence: Synthetic oligonucleotide
ccuucagaaaguuguugauga

SEQ ID NO: 1439 - RNA, 21 nt, Artificial Sequence
  Description of Artificial Sequence: Synthetic oligonucleotide
ugagcacuggcauaaggacua

SEQ ID NO: 1440 - RNA, 21 nt, Artificial Sequence
  Description of Artificial Sequence: Synthetic oligonucleotide
cuaguuaaggcaaaucaggua

SEQ ID NO: 1441 - RNA, 21 nt, Artificial Sequence
  Description of Artificial Sequence: Synthetic oligonucleotide
cugaggauccucaacaaugga

SEQ ID NO: 1442 - RNA, 21 nt, Artificial Sequence
  Description of Artificial Sequence: Synthetic oligonucleotide
guuuaugguaguaguuuuuca

SEQ ID NO: 1443 - RNA, 21 nt, Artificial Sequence
  Description of Artificial Sequence: Synthetic oligonucleotide
ugugaccuggauugugcucaa

SEQ ID NO: 1444 - RNA, 21 nt, Artificial Sequence
  Description of Artificial Sequence: Synthetic oligonucleotide
acaucgacacucauacagcca

SEQ ID NO: 1445 - RNA, 21 nt, Artificial Sequence
  Description of Artificial Sequence: Synthetic oligonucleotide
gauugugcucaaggaacccaa

SEQ ID NO: 1446 - RNA, 21 nt, Artificial Sequence
  Description of Artificial Sequence: Synthetic oligonucleotide
ucauacagccaaguaugacca

SEQ ID NO: 1447 - RNA, 21 nt, Artificial Sequence
  Description of Artificial Sequence: Synthetic oligonucleotide
uaaaauagucaugauucuaua

SEQ ID NO: 1448 - RNA, 21 nt, Artificial Sequence
  Description of Artificial Sequence: Synthetic oligonucleotide
gugcucaaggaacccaucaga

SEQ ID NO: 1449 - RNA, 21 nt, Artificial Sequence
  Description of Artificial Sequence: Synthetic oligonucleotide
cgaagaacugaugguggacaa

SEQ ID NO: 1450 - RNA, 21 nt, Artificial Sequence
  Description of Artificial Sequence: Synthetic oligonucleotide
aauaaaaugugaagacuagaa

SEQ ID NO: 1451 - RNA, 21 nt, Artificial Sequence
  Description of Artificial Sequence: Synthetic oligonucleotide
ggcugguuggugcuuuguuua

SEQ ID NO: 1452 - RNA, 21 nt, Artificial Sequence
  Description of Artificial Sequence: Synthetic oligonucleotide
uuguucacagcauguagggua

SEQ ID NO: 1453 - RNA, 21 nt, Artificial Sequence
  Description of Artificial Sequence: Synthetic oligonucleotide
uucaaauaagauggucccaua

SEQ ID NO: 1454 - RNA, 21 nt, Artificial Sequence
  Description of Artificial Sequence: Synthetic oligonucleotide
uuuaaaacauaggaaaguaga

SEQ ID NO: 1455 - RNA, 21 nt, Artificial Sequence
  Description of Artificial Sequence: Synthetic oligonucleotide
uuguuuaugguaguaguuuua

SEQ ID NO: 1456 - RNA, 21 nt, Artificial Sequence
  Description of Artificial Sequence: Synthetic oligonucleotide
gcuaguuaaggcaaaucagga

SEQ ID NO: 1457 - RNA, 21 nt, Artificial Sequence
  Description of Artificial Sequence: Synthetic oligonucleotide
guaaaauagucaugauucuaa

SEQ ID NO: 1458 - RNA, 21 nt, Artificial Sequence
  Description of Artificial Sequence: Synthetic oligonucleotide
gacuggccguucuagguauua

SEQ ID NO: 1459 - RNA, 21 nt, Artificial Sequence
  Description of Artificial Sequence: Synthetic oligonucleotide
ucagccacugaagaacaggca

SEQ ID NO: 1460 - RNA, 21 nt, Artificial Sequence
  Description of Artificial Sequence: Synthetic oligonucleotide
uggaaugugugaccuggauua

SEQ ID NO: 1461 - RNA, 21 nt, Artificial Sequence
  Description of Artificial Sequence: Synthetic oligonucleotide
ucacagcauguagggugauga

SEQ ID NO: 1462 - RNA, 21 nt, Artificial Sequence
  Description of Artificial Sequence: Synthetic oligonucleotide
uacagccaaguaugacccuua

SEQ ID NO: 1463 - RNA, 21 nt, Artificial Sequence
  Description of Artificial Sequence: Synthetic oligonucleotide
cugagcacuggcauaaggaca

SEQ ID NO: 1464 - RNA, 21 nt, Artificial Sequence
  Description of Artificial Sequence: Synthetic oligonucleotide
gcucaaggaacccaucagcga

SEQ ID NO: 1465 - RNA, 21 nt, Artificial Sequence
  Description of Artificial Sequence: Synthetic oligonucleotide
uucuggaaugugugaccugga

SEQ ID NO: 1466 - RNA, 21 nt, Artificial Sequence
  Description of Artificial Sequence: Synthetic oligonucleotide
uaaauugagcuaguuaaggca

SEQ ID NO: 1467 - RNA, 21 nt, Artificial Sequence
  Description of Artificial Sequence: Synthetic oligonucleotide
uauuuuuuugaagguuggcaa

SEQ ID NO: 1468 - RNA, 21 nt, Artificial Sequence
  Description of Artificial Sequence: Synthetic oligonucleotide
uaauuagaguugugauacaga

SEQ ID NO: 1469 - RNA, 21 nt, Artificial Sequence
  Description of Artificial Sequence: Synthetic oligonucleotide
ugacucucaggacaaagcaga

SEQ ID NO: 1470 - RNA, 21 nt, Artificial Sequence
  Description of Artificial Sequence: Synthetic oligonucleotide
cauacagccaaguaugaccca

SEQ ID NO: 1471 - RNA, 21 nt, Artificial Sequence
  Description of Artificial Sequence: Synthetic oligonucleotide
guauuuuuuugaagguuggca

SEQ ID NO: 1472 - RNA, 21 nt, Artificial Sequence
  Description of Artificial Sequence: Synthetic oligonucleotide
cacagcauguagggugaugaa

SEQ ID NO: 1473 - RNA, 21 nt, Artificial Sequence
  Description of Artificial Sequence: Synthetic oligonucleotide
uauaauuagaguugugauaca

SEQ ID NO: 1474 - RNA, 21 nt, Artificial Sequence
  Description of Artificial Sequence: Synthetic oligonucleotide
gauuuugggaaagcugugcaa

SEQ ID NO: 1475 - RNA, 21 nt, Artificial Sequence
  Description of Artificial Sequence: Synthetic oligonucleotide
uaaaacaaagggcaagaguga

SEQ ID NO: 1476 - RNA, 21 nt, Artificial Sequence
  Description of Artificial Sequence: Synthetic oligonucleotide
ucaaggaacccaucagcguca

SEQ ID NO: 1477 - RNA, 21 nt, Artificial Sequence
  Description of Artificial Sequence: Synthetic oligonucleotide
ucagaaaguuguugaugugca

SEQ ID NO: 1478 - RNA, 21 nt, Artificial Sequence
  Description of Artificial Sequence: Synthetic oligonucleotide
ccaaauaaugaaucuucggga

SEQ ID NO: 1479 - RNA, 21 nt, Artificial Sequence
  Description of Artificial Sequence: Synthetic oligonucleotide
agcauguagggugaugagcaa

SEQ ID NO: 1480 - RNA, 21 nt, Artificial Sequence
  Description of Artificial Sequence: Synthetic oligonucleotide
gauaaauugagcuaguuaaga

SEQ ID NO: 1481 - RNA, 21 nt, Artificial Sequence
  Description of Artificial Sequence: Synthetic oligonucleotide
cucagccacugaagaacagga

SEQ ID NO: 1482 - RNA, 21 nt, Artificial Sequence
  Description of Artificial Sequence: Synthetic oligonucleotide
cagcauguagggugaugagca

SEQ ID NO: 1483 - RNA, 21 nt, Artificial Sequence
  Description of Artificial Sequence: Synthetic oligonucleotide
auaaugaaucuucggguguua

SEQ ID NO: 1484 - RNA, 21 nt, Artificial Sequence
  Description of Artificial Sequence: Synthetic oligonucleotide
ggaacccaucagcgucagcaa

SEQ ID NO: 1485 - RNA, 21 nt, Artificial Sequence
  Description of Artificial Sequence: Synthetic oligonucleotide
uguucacagcauguaggguga

SEQ ID NO: 1486 - RNA, 21 nt, Artificial Sequence
  Description of Artificial Sequence: Synthetic oligonucleotide
aaacaaagggcaagagugcua

SEQ ID NO: 1487 - RNA, 21 nt, Artificial Sequence
  Description of Artificial Sequence: Synthetic oligonucleotide
ugugugaccuggauugugcua

SEQ ID NO: 1488 - RNA, 21 nt, Artificial Sequence
  Description of Artificial Sequence: Synthetic oligonucleotide
aauaaugaaucuucgggugua

SEQ ID NO: 1489 - RNA, 21 nt, Artificial Sequence
  Description of Artificial Sequence: Synthetic oligonucleotide
auuuuuuugaagguuggcaga

SEQ ID NO: 1490 - RNA, 21 nt, Artificial Sequence
  Description of Artificial Sequence: Synthetic oligonucleotide
ugcucaaggaacccaucagca

SEQ ID NO: 1491 - RNA, 21 nt, Artificial Sequence
  Description of Artificial Sequence: Synthetic oligonucleotide
uaaugaaucuucggguguuua

SEQ ID NO: 1492 - RNA, 21 nt, Artificial Sequence
  Description of Artificial Sequence: Synthetic oligonucleotide
guggcugguuggugcuuugua

SEQ ID NO: 1493 - RNA, 21 nt, Artificial Sequence
  Description of Artificial Sequence: Synthetic oligonucleotide
aaggaacccaucagcgucaga

SEQ ID NO: 1494 - RNA, 21 nt, Artificial Sequence
  Description of Artificial Sequence: Synthetic oligonucleotide
uuaaaacaaagggcaagagua

SEQ ID NO: 1495 - RNA, 21 nt, Artificial Sequence
  Description of Artificial Sequence: Synthetic oligonucleotide
cuguggcugguuggugcuuua

SEQ ID NO: 1496 - RNA, 21 nt, Artificial Sequence
  Description of Artificial Sequence: Synthetic oligonucleotide
cagcucagccacugaagaaca

SEQ ID NO: 1497 - RNA, 21 nt, Artificial Sequence
  Description of Artificial Sequence: Synthetic oligonucleotide
aaauaaugaaucuucggguga

SEQ ID NO: 1498 - RNA, 21 nt, Artificial Sequence
  Description of Artificial Sequence: Synthetic oligonucleotide
gaaugugugaccuggauugua

SEQ ID NO: 1499 - RNA, 21 nt, Artificial Sequence
  Description of Artificial Sequence: Synthetic oligonucleotide
cauguagggugaugagcacua

SEQ ID NO: 1500 - RNA, 21 nt, Artificial Sequence
  Description of Artificial Sequence: Synthetic oligonucleotide
ggacuggccguucuagguaua

SEQ ID NO: 1501 - RNA, 21 nt, Artificial Sequence
  Description of Artificial Sequence: Synthetic oligonucleotide
auaaauugagcuaguuaagga

SEQ ID NO: 1502 - RNA, 21 nt, Artificial Sequence
  Description of Artificial Sequence: Synthetic oligonucleotide
gaaaguuguugaugugcugga

SEQ ID NO: 1503 - RNA, 21 nt, Artificial Sequence
  Description of Artificial Sequence: Synthetic oligonucleotide
aacaaagggcaagagugcuga

SEQ ID NO: 1504 - RNA, 21 nt, Artificial Sequence
  Description of Artificial Sequence: Synthetic oligonucleotide
ccugagcacuggcauaaggaa

SEQ ID NO: 1505 - RNA, 21 nt, Artificial Sequence
  Description of Artificial Sequence: Synthetic oligonucleotide
ugaugguggacaacuggcgca

SEQ ID NO: 1506 - RNA, 21 nt, Artificial Sequence
  Description of Artificial Sequence: Synthetic oligonucleotide
acaaagggcaagagugcugaa

SEQ ID NO: 1507 - RNA, 21 nt, Artificial Sequence
  Description of Artificial Sequence: Synthetic oligonucleotide
acggaccugagcacuggcaua

SEQ ID NO: 1508 - RNA, 21 nt, Artificial Sequence
  Description of Artificial Sequence: Synthetic oligonucleotide
ugggaaagcugugcagcaaca

SEQ ID NO: 1509 - RNA, 21 nt, Artificial Sequence
  Description of Artificial Sequence: Synthetic oligonucleotide
aacccaucagcgucagcagca

SEQ ID NO: 1510 - RNA, 21 nt, Artificial Sequence
  Description of Artificial Sequence: Synthetic oligonucleotide
agcucagccacugaagaacaa

SEQ ID NO: 1511 - RNA, 21 nt, Artificial Sequence
  Description of Artificial Sequence: Synthetic oligonucleotide
uuuugaagguuggcagcgcua

SEQ ID NO: 1512 - RNA, 21 nt, Artificial Sequence
  Description of Artificial Sequence: Synthetic oligonucleotide
guaugacccuucccugaagca

SEQ ID NO: 1513 - RNA, 21 nt, Artificial Sequence
  Description of Artificial Sequence: Synthetic oligonucleotide
cuacccaggcucacugaccaa

SEQ ID NO: 1514 - RNA, 21 nt, Artificial Sequence
  Description of Artificial Sequence: Synthetic oligonucleotide
acccaggcucacugaccacca

SEQ ID NO: 1515 - RNA, 21 nt, Artificial Sequence
  Description of Artificial Sequence: Synthetic oligonucleotide
auggacuggccguucuaggua

SEQ ID NO: 1516 - RNA, 21 nt, Artificial Sequence
  Description of Artificial Sequence: Synthetic oligonucleotide
accugagcacuggcauaagga

SEQ ID NO: 1517 - RNA, 21 nt, Artificial Sequence
  Description of Artificial Sequence: Synthetic oligonucleotide
ccaucagcgucagcagcgaga

SEQ ID NO: 1518 - RNA, 21 nt, Artificial Sequence
  Description of Artificial Sequence: Synthetic oligonucleotide
uggacuggccguucuagguaa

SEQ ID NO: 1519 - RNA, 21 nt, Artificial Sequence
  Description of Artificial Sequence: Synthetic oligonucleotide
uuuugggaaagcugugcagca

SEQ ID NO: 1520 - RNA, 21 nt, Artificial Sequence
  Description of Artificial Sequence: Synthetic oligonucleotide
cugauggacuggccguucuaa

SEQ ID NO: 1521 - RNA, 21 nt, Artificial Sequence
  Description of Artificial Sequence: Synthetic oligonucleotide
accuacccaggcucacugaca

SEQ ID NO: 1522 - RNA, 21 nt, Artificial Sequence
  Description of Artificial Sequence: Synthetic oligonucleotide
ggaccuacccaggcucacuga

SEQ ID NO: 1523 - RNA, 21 nt, Artificial Sequence
  Description of Artificial Sequence: Synthetic oligonucleotide
gauggacuggccguucuagga

SEQ ID NO: 1524 - RNA, 21 nt, Artificial Sequence
  Description of Artificial Sequence: Synthetic oligonucleotide
aagguuggcagcgcuaaacca

SEQ ID NO: 1525 - RNA, 21 nt, Artificial Sequence
  Description of Artificial Sequence: Synthetic oligonucleotide
ugauggacuggccguucuaga

SEQ ID NO: 1526 - RNA, 21 nt, Artificial Sequence
  Description of Artificial Sequence: Synthetic oligonucleotide
aacugaugguggacaacugga

SEQ ID NO: 1527 - RNA, 21 nt, Artificial Sequence
  Description of Artificial Sequence: Synthetic oligonucleotide
acaacugcuguggcugguuga

SEQ ID NO: 1528 - RNA, 21 nt, Artificial Sequence
  Description of Artificial Sequence: Synthetic oligonucleotide
caacggaccugagcacuggca

SEQ ID NO: 1529 - RNA, 21 nt, Artificial Sequence
  Description of Artificial Sequence: Synthetic oligonucleotide
caacugcuguggcugguugga

SEQ ID NO: 1530 - RNA, 21 nt, Artificial Sequence
  Description of Artificial Sequence: Synthetic oligonucleotide
acugaugguggacaacuggca

SEQ ID NO: 1531 - RNA, 21 nt, Artificial Sequence
  Description of Artificial Sequence: Synthetic oligonucleotide
cugcuguggcugguuggugca

SEQ ID NO: 1532 - skipped

SEQ ID NO: 1533 - DNA, 23 bp, Artificial Sequence
  Description of Artificial Sequence: Synthetic oligonucleotide
  Description of Combined DNA/RNA Molecule: Synthetic oligonucleotide
uuugcutgaucauaggaaacaga

SEQ ID NO: 1534 - RNA, 23 nt, Artificial Sequence
  Description of Artificial Sequence: Synthetic oligonucleotide
ugaucgaaguuagugaagucagc

SEQ ID NO: 1535 - RNA, 23 nt, Artificial Sequence
  Description of Artificial Sequence: Synthetic oligonucleotide
ucuuauuugaaggaagcuuugau

SEQ ID NO: 1536 - DNA, 23 bp, Artificial Sequence
  Description of Artificial Sequence: Synthetic oligonucleotide
  Description of Combined DNA/RNA Molecule: Synthetic oligonucleotide
uuuatutgaaggaagcuuugauu

SEQ ID NO: 1537 - RNA, 23 nt, Artificial Sequence
  Description of Artificial Sequence: Synthetic oligonucleotide
uuucauuauuuggauacagacua

SEQ ID NO: 1538 - DNA, 23 bp, Artificial Sequence
  Description of Artificial Sequence: Synthetic oligonucleotide
  Description of Combined DNA/RNA Molecule: Synthetic oligonucleotide
uuucautauuuggauacagacua

SEQ ID NO: 1539 - DNA, 23 bp, Artificial Sequence
  Description of Artificial Sequence: Synthetic oligonucleotide
  Description of Combined DNA/RNA Molecule: Synthetic oligonucleotide
uugaagtuaaguuuacggaauuu

SEQ ID NO: 1540 - DNA, 23 bp, Artificial Sequence
  Description of Artificial Sequence: Synthetic oligonucleotide
  Description of Combined DNA/RNA Molecule: Synthetic oligonucleotide
ugaagutgcuugaucauaggaaa

SEQ ID NO: 1541 - DNA, 23 bp, Artificial Sequence
  Description of Artificial Sequence: Synthetic oligonucleotide
  Description of Combined DNA/RNA Molecule: Synthetic oligonucleotide
uguugctugaucauaggaaacag

SEQ ID NO: 1542 - DNA, 23 bp, Artificial Sequence
  Description of Artificial Sequence: Synthetic oligonucleotide
  Description of Combined DNA/RNA Molecule: Synthetic oligonucleotide
ucuatgtuuuaaaagcagcauuu

SEQ ID NO: 1543 - DNA, 23 bp, Artificial Sequence
  Description of Artificial Sequence: Synthetic oligonucleotide
  Description of Combined DNA/RNA Molecule: Synthetic oligonucleotide
uuaugatauauugucugaaugga

SEQ ID NO: 1544 - RNA, 23 nt, Artificial Sequence
  Description of Artificial Sequence: Synthetic oligonucleotide
uggaucgaaguuagugaagucag

SEQ ID NO: 1545 - RNA, 23 nt, Artificial Sequence
  Description of Artificial Sequence: Synthetic oligonucleotide
uaugauauauugucugaauggaa

SEQ ID NO: 1546 - DNA, 23 bp, Artificial Sequence
  Description of Artificial Sequence: Synthetic oligonucleotide
  Description of Combined DNA/RNA Molecule: Synthetic oligonucleotide
uauucatuauuuggauacagacu

SEQ ID NO: 1547 - DNA, 23 bp, Artificial Sequence
  Description of Artificial Sequence: Synthetic oligonucleotide
  Description of Combined DNA/RNA Molecule: Synthetic oligonucleotide
uauutgaaggaagcuuugauuug

SEQ ID NO: 1548 - DNA, 23 bp, Artificial Sequence
  Description of Artificial Sequence: Synthetic oligonucleotide
  Description of Combined DNA/RNA Molecule: Synthetic oligonucleotide
uuuatgauauauugucugaaugg

SEQ ID NO: 1549 - RNA, 23 nt, Artificial Sequence
  Description of Artificial Sequence: Synthetic oligonucleotide
ucauugaaguuaaguuuacggaa

SEQ ID NO: 1550 - DNA, 23 bp, Artificial Sequence
  Description of Artificial Sequence: Synthetic oligonucleotide
  Description of Combined DNA/RNA Molecule: Synthetic oligonucleotide
ucautgaaguuaaguuuacggaa

SEQ ID NO: 1551 - DNA, 23 bp, Artificial Sequence
  Description of Artificial Sequence: Synthetic oligonucleotide
  Description of Combined DNA/RNA Molecule: Synthetic oligonucleotide
ugaagutagugaagucagcacuc

SEQ ID NO: 1552 - RNA, 23 nt, Artificial Sequence
  Description of Artificial Sequence: Synthetic oligonucleotide
uaucuuauuugaaggaagcuuug

SEQ ID NO: 1553 - DNA, 23 bp, Artificial Sequence
  Description of Artificial Sequence: Synthetic oligonucleotide
  Description of Combined DNA/RNA Molecule: Synthetic oligonucleotide
uauctuauuugaaggaagcuuug

SEQ ID NO: 1554 - RNA, 23 nt, Artificial Sequence
  Description of Artificial Sequence: Synthetic oligonucleotide
uaaguuaaguuuacggaauuuca

SEQ ID NO: 1555 - DNA, 23 bp, Artificial Sequence
  Description of Artificial Sequence: Synthetic oligonucleotide
  Description of Combined DNA/RNA Molecule: Synthetic oligonucleotide
uugatcauaggaaacagacaggg

SEQ ID NO: 1556 - RNA, 23 nt, Artificial Sequence
  Description of Artificial Sequence: Synthetic oligonucleotide
uaagauucauuauuuggauacag

SEQ ID NO: 1557 - DNA, 23 bp, Artificial Sequence
  Description of Artificial Sequence: Synthetic oligonucleotide
  Description of Combined DNA/RNA Molecule: Synthetic oligonucleotide
uaagautcauuauuuggauacag

SEQ ID NO: 1558 - RNA, 23 nt, Artificial Sequence
  Description of Artificial Sequence: Synthetic oligonucleotide
uaucgaaguuagugaagucagca

SEQ ID NO: 1559 - RNA, 23 nt, Artificial Sequence
  Description of Artificial Sequence: Synthetic oligonucleotide
uccaucuuauuugaaggaagcuu

SEQ ID NO: 1560 - DNA, 23 bp, Artificial Sequence
  Description of Artificial Sequence: Synthetic oligonucleotide
  Description of Combined DNA/RNA Molecule: Synthetic oligonucleotide
uccatctuauuugaaggaagcuu

SEQ ID NO: 1561 - RNA, 23 nt, Artificial Sequence
  Description of Artificial Sequence: Synthetic oligonucleotide
uuuugaaggaagcuuugauuugc

SEQ ID NO: 1562 - RNA, 23 nt, Artificial Sequence
  Description of Artificial Sequence: Synthetic oligonucleotide
ucaucuuauuugaaggaagcuuu

SEQ ID NO: 1563 - RNA, 23 nt, Artificial Sequence
  Description of Artificial Sequence: Synthetic oligonucleotide
uccuauguuuuaaaagcagcauu

SEQ ID NO: 1564 - RNA, 23 nt, Artificial Sequence
  Description of Artificial Sequence: Synthetic oligonucleotide
uaaggaagcuuugauuugccugu

SEQ ID NO: 1565 - RNA, 23 nt, Artificial Sequence
  Description of Artificial Sequence: Synthetic oligonucleotide
ugaaggaagcuuugauuugccug

SEQ ID NO: 1566 - RNA, 23 nt, Artificial Sequence
  Description of Artificial Sequence: Synthetic oligonucleotide
uucuuauuugaaggaagcuuuga

SEQ ID NO: 1567 - DNA, 23 bp, Artificial Sequence
  Description of Artificial Sequence: Synthetic oligonucleotide
  Description of Combined DNA/RNA Molecule: Synthetic oligonucleotide
uucutatuugaaggaagcuuuga

SEQ ID NO: 1568 - RNA, 23 nt, Artificial Sequence
  Description of Artificial Sequence: Synthetic oligonucleotide
uguuuuaaaagcagcauuuuagu

SEQ ID NO: 1569 - RNA, 23 nt, Artificial Sequence
  Description of Artificial Sequence: Synthetic oligonucleotide
uagucaagguacuuuauucuuau

SEQ ID NO: 1570 - RNA, 23 nt, Artificial Sequence
  Description of Artificial Sequence: Synthetic oligonucleotide
uaagucaagguacuuuauucuua

SEQ ID NO: 1571 - DNA, 23 bp, Artificial Sequence
  Description of Artificial Sequence: Synthetic oligonucleotide
  Description of Combined DNA/RNA Molecule: Synthetic oligonucleotide
uaagtcaagguacuuuauucuua

SEQ ID NO: 1572 - DNA, 23 bp, Artificial Sequence
  Description of Artificial Sequence: Synthetic oligonucleotide
  Description of Combined DNA/RNA Molecule: Synthetic oligonucleotide
ucuugatcauaggaaacagacag

SEQ ID NO: 1573 - RNA, 23 nt, Artificial Sequence
  Description of Artificial Sequence: Synthetic oligonucleotide
uauugaaguuaaguuuacggaau

SEQ ID NO: 1574 - RNA, 23 nt, Artificial Sequence
  Description of Artificial Sequence: Synthetic oligonucleotide
ugucacacauuccagaagaggag

SEQ ID NO: 1575 - DNA, 23 bp, Artificial Sequence
  Description of Artificial Sequence: Synthetic oligonucleotide
  Description of Combined DNA/RNA Molecule: Synthetic oligonucleotide
ugaagatucauuauuuggauaca

SEQ ID NO: 1576 - DNA, 23 bp, Artificial Sequence
  Description of Artificial Sequence: Synthetic oligonucleotide
  Description of Combined DNA/RNA Molecule: Synthetic oligonucleotide
ugcutgaucauaggaaacagaca

SEQ ID NO: 1577 - DNA, 23 bp, Artificial Sequence
  Description of Artificial Sequence: Synthetic oligonucleotide
  Description of Combined DNA/RNA Molecule: Synthetic oligonucleotide
uguatgagugucgaugucaacag

SEQ ID NO: 1578 - RNA, 23 nt, Artificial Sequence
  Description of Artificial Sequence: Synthetic oligonucleotide
uugaacaaagucaagguacuuua

SEQ ID NO: 1579 - DNA, 23 bp, Artificial Sequence
  Description of Artificial Sequence: Synthetic oligonucleotide
  Description of Combined DNA/RNA Molecule: Synthetic oligonucleotide
uaaatcaccaagguagaucugug

SEQ ID NO: 1580 - DNA, 23 bp, Artificial Sequence
  Description of Artificial Sequence: Synthetic oligonucleotide
  Description of Combined DNA/RNA Molecule: Synthetic oligonucleotide
uguucctugagcacaauccaggu

SEQ ID NO: 1581 - DNA, 23 bp, Artificial Sequence
  Description of Artificial Sequence: Synthetic oligonucleotide
  Description of Combined DNA/RNA Molecule: Synthetic oligonucleotide
uuuucctauguuuuaaaagcagc

SEQ ID NO: 1582 - RNA, 23 nt, Artificial Sequence
  Description of Artificial Sequence: Synthetic oligonucleotide
ucgaaguuagugaagucagcacu

SEQ ID NO: 1583 - DNA, 23 bp, Artificial Sequence
  Description of Artificial Sequence: Synthetic oligonucleotide
  Description of Combined DNA/RNA Molecule: Synthetic oligonucleotide
ucgaagtuagugaagucagcacu

SEQ ID NO: 1584 - RNA, 23 nt, Artificial Sequence
  Description of Artificial Sequence: Synthetic oligonucleotide
uaguuaaguuuacggaauuucaa

SEQ ID NO: 1585 - DNA, 23 bp, Artificial Sequence
  Description of Artificial Sequence: Synthetic oligonucleotide
  Description of Combined DNA/RNA Molecule: Synthetic oligonucleotide
uagutaaguuuacggaauuucaa

SEQ ID NO: 1586 - RNA, 23 nt, Artificial Sequence
  Description of Artificial Sequence: Synthetic oligonucleotide
uauuuuaccugauuugccuuaac

SEQ ID NO: 1587 - DNA, 23 bp, Artificial Sequence
  Description of Artificial Sequence: Synthetic oligonucleotide
  Description of Combined DNA/RNA Molecule: Synthetic oligonucleotide
uauutuaccugauuugccuuaac

SEQ ID NO: 1588 - RNA, 23 nt, Artificial Sequence
  Description of Artificial Sequence: Synthetic oligonucleotide
uuucaaaaaaauaccuagaacgg

SEQ ID NO: 1589 - RNA, 23 nt, Artificial Sequence
  Description of Artificial Sequence: Synthetic oligonucleotide
uuaacuagcucaauuuaucuugu

SEQ ID NO: 1590 - DNA, 23 bp, Artificial Sequence
  Description of Artificial Sequence: Synthetic oligonucleotide
  Description of Combined DNA/RNA Molecule: Synthetic oligonucleotide
uguagatcugugcuuagcuaaag

SEQ ID NO: 1591 - DNA, 23 bp, Artificial Sequence
  Description of Artificial Sequence: Synthetic oligonucleotide
  Description of Combined DNA/RNA Molecule: Synthetic oligonucleotide
ugaggatcgaaguuagugaaguc

SEQ ID NO: 1592 - DNA, 23 bp, Artificial Sequence
  Description of Artificial Sequence: Synthetic oligonucleotide
  Description of Combined DNA/RNA Molecule: Synthetic oligonucleotide
ugaagutaaguuuacggaauuuc

SEQ ID NO: 1593 - RNA, 23 nt, Artificial Sequence
  Description of Artificial Sequence: Synthetic oligonucleotide
uuuccuauguuuuaaaagcagca

SEQ ID NO: 1594 - DNA, 23 bp, Artificial Sequence
  Description of Artificial Sequence: Synthetic oligonucleotide
  Description of Combined DNA/RNA Molecule: Synthetic oligonucleotide
uaugagtgucgaugucaacaggg

SEQ ID NO: 1595 - RNA, 23 nt, Artificial Sequence
  Description of Artificial Sequence: Synthetic oligonucleotide
ucgaggaucgaaguuagugaagu

SEQ ID NO: 1596 - RNA, 23 nt, Artificial Sequence
  Description of Artificial Sequence: Synthetic oligonucleotide
uaagguagaucugugcuuagcua

SEQ ID NO: 1597 - RNA, 23 nt, Artificial Sequence
  Description of Artificial Sequence: Synthetic oligonucleotide
uaacaaagucaagguacuuuauu

SEQ ID NO: 1598 - DNA, 23 bp, Artificial Sequence
  Description of Artificial Sequence: Synthetic oligonucleotide
  Description of Combined DNA/RNA Molecule: Synthetic oligonucleotide
uugututaaaagcagcauuuuag

SEQ ID NO: 1599 - RNA, 23 nt, Artificial Sequence
  Description of Artificial Sequence: Synthetic oligonucleotide
uuccuauguuuuaaaagcagcau

SEQ ID NO: 1600 - DNA, 23 bp, Artificial Sequence
  Description of Artificial Sequence: Synthetic oligonucleotide
  Description of Combined DNA/RNA Molecule: Synthetic oligonucleotide
uucctatguuuuaaaagcagcau

SEQ ID NO: 1601 - RNA, 23 nt, Artificial Sequence
  Description of Artificial Sequence: Synthetic oligonucleotide
uuacauuacauagaaucaugacu

SEQ ID NO: 1602 - DNA, 23 bp, Artificial Sequence
  Description of Artificial Sequence: Synthetic oligonucleotide
  Description of Combined DNA/RNA Molecule: Synthetic oligonucleotide
uuacautacauagaaucaugacu

SEQ ID NO: 1603 - RNA, 23 nt, Artificial Sequence
  Description of Artificial Sequence: Synthetic oligonucleotide
uaaguuagugaagucagcacucu

SEQ ID NO: 1604 - DNA, 23 bp, Artificial Sequence
  Description of Artificial Sequence: Synthetic oligonucleotide
  Description of Combined DNA/RNA Molecule: Synthetic oligonucleotide
ucaaggtagaucugugcuuagcu

SEQ ID NO: 1605 - RNA, 23 nt, Artificial Sequence
  Description of Artificial Sequence: Synthetic oligonucleotide
ucacgaggaucgaaguuagugaa

SEQ ID NO: 1606 - DNA, 23 bp, Artificial Sequence
  Description of Artificial Sequence: Synthetic oligonucleotide
  Description of Combined DNA/RNA Molecule: Synthetic oligonucleotide
uuugautugccuguucuucagug

SEQ ID NO: 1607 - RNA, 23 nt, Artificial Sequence
  Description of Artificial Sequence: Synthetic oligonucleotide
ugaacaaagucaagguacuuuau

SEQ ID NO: 1608 - DNA, 23 bp, Artificial Sequence
  Description of Artificial Sequence: Synthetic oligonucleotide
  Description of Combined DNA/RNA Molecule: Synthetic oligonucleotide
uacuactaccauaaacaaagcac

SEQ ID NO: 1609 - DNA, 23 bp, Artificial Sequence
  Description of Artificial Sequence: Synthetic oligonucleotide
  Description of Combined DNA/RNA Molecule: Synthetic oligonucleotide
uuuacatuacauagaaucaugac

SEQ ID NO: 1610 - RNA, 23 nt, Artificial Sequence
  Description of Artificial Sequence: Synthetic oligonucleotide
uucaaaaaaauaccuagaacggc

SEQ ID NO: 1611 - RNA, 23 nt, Artificial Sequence
  Description of Artificial Sequence: Synthetic oligonucleotide
ucuucaaaaaaauaccuagaacg

SEQ ID NO: 1612 - RNA, 23 nt, Artificial Sequence
  Description of Artificial Sequence: Synthetic oligonucleotide
uauccaaggauucaggaaggagg

SEQ ID NO: 1613 - RNA, 23 nt, Artificial Sequence
  Description of Artificial Sequence: Synthetic oligonucleotide
uuuaaaagcagcauuuuagucaa

SEQ ID NO: 1614 - DNA, 23 bp, Artificial Sequence
  Description of Artificial Sequence: Synthetic oligonucleotide
  Description of Combined DNA/RNA Molecule: Synthetic oligonucleotide
ugaagctuugauuugccuguucu

SEQ ID NO: 1615 - RNA, 23 nt, Artificial Sequence
  Description of Artificial Sequence: Synthetic oligonucleotide
uaauccaaggauucaggaaggag

SEQ ID NO: 1616 - DNA, 23 bp, Artificial Sequence
  Description of Artificial Sequence: Synthetic oligonucleotide
  Description of Combined DNA/RNA Molecule: Synthetic oligonucleotide
ucuutgtccugagagucaucaaa

SEQ ID NO: 1617 - RNA, 23 nt, Artificial Sequence
  Description of Artificial Sequence: Synthetic oligonucleotide
ucugagagucaucaaacuccacg

SEQ ID NO: 1618 - RNA, 23 nt, Artificial Sequence
  Description of Artificial Sequence: Synthetic oligonucleotide
ucgaagauucauuauuuggauac

SEQ ID NO: 1619 - DNA, 23 bp, Artificial Sequence
  Description of Artificial Sequence: Synthetic oligonucleotide
  Description of Combined DNA/RNA Molecule: Synthetic oligonucleotide
ucaugctgugaacaaagucaagg

SEQ ID NO: 1620 - RNA, 23 nt, Artificial Sequence
  Description of Artificial Sequence: Synthetic oligonucleotide
ucaaaucaccaagguagaucugu

SEQ ID NO: 1621 - RNA, 23 nt, Artificial Sequence
  Description of Artificial Sequence: Synthetic oligonucleotide
uuacagaaaaacuacuaccauaa

SEQ ID NO: 1622 - DNA, 23 bp, Artificial Sequence
  Description of Artificial Sequence: Synthetic oligonucleotide
  Description of Combined DNA/RNA Molecule: Synthetic oligonucleotide
uugctgtgaacaaagucaaggua

SEQ ID NO: 1623 - DNA, 23 bp, Artificial Sequence
  Description of Artificial Sequence: Synthetic oligonucleotide
  Description of Combined DNA/RNA Molecule: Synthetic oligonucleotide
uuuccutgagcacaauccagguc

SEQ ID NO: 1624 - DNA, 23 bp, Artificial Sequence
  Description of Artificial Sequence: Synthetic oligonucleotide
  Description of Combined DNA/RNA Molecule: Synthetic oligonucleotide
uugatutgccuuaacuagcucaa

SEQ ID NO: 1625 - DNA, 23 bp, Artificial Sequence
  Description of Artificial Sequence: Synthetic oligonucleotide
  Description of Combined DNA/RNA Molecule: Synthetic oligonucleotide
uugatutgccuguucuucagugg

SEQ ID NO: 1626 - DNA, 23 bp, Artificial Sequence
  Description of Artificial Sequence: Synthetic oligonucleotide
  Description of Combined DNA/RNA Molecule: Synthetic oligonucleotide
uuuugatuugccuguucuucagu

SEQ ID NO: 1627 - RNA, 23 nt, Artificial Sequence
  Description of Artificial Sequence: Synthetic oligonucleotide
ucacacauuccagaagaggaggg

SEQ ID NO: 1628 - RNA, 23 nt, Artificial Sequence
  Description of Artificial Sequence: Synthetic oligonucleotide
uucaaacuccacguugaaagcau

SEQ ID NO: 1629 - RNA, 23 nt, Artificial Sequence
  Description of Artificial Sequence: Synthetic oligonucleotide
ucaaacuccacguugaaagcaug

SEQ ID NO: 1630 - DNA, 23 bp, Artificial Sequence
  Description of Artificial Sequence: Synthetic oligonucleotide
  Description of Combined DNA/RNA Molecule: Synthetic oligonucleotide
ucaaactccacguugaaagcaug

SEQ ID NO: 1631 - DNA, 23 bp, Artificial Sequence
  Description of Artificial Sequence: Synthetic oligonucleotide
  Description of Combined DNA/RNA Molecule: Synthetic oligonucleotide
uaaucatgacuauuuuaccugau

SEQ ID NO: 1632 - DNA, 23 bp, Artificial Sequence
  Description of Artificial Sequence: Synthetic oligonucleotide
  Description of Combined DNA/RNA Molecule: Synthetic oligonucleotide
ugautcauuauuuggauacagac

SEQ ID NO: 1633 - DNA, 23 bp, Artificial Sequence
  Description of Artificial Sequence: Synthetic oligonucleotide
  Description of Combined DNA/RNA Molecule: Synthetic oligonucleotide
uuaututaccugauuugccuuaa

SEQ ID NO: 1634 - RNA, 23 nt, Artificial Sequence
  Description of Artificial Sequence: Synthetic oligonucleotide
uccaaggauucaggaaggaggcc

SEQ ID NO: 1635 - DNA, 23 bp, Artificial Sequence
  Description of Artificial Sequence: Synthetic oligonucleotide
  Description of Combined DNA/RNA Molecule: Synthetic oligonucleotide
ugaccatcuuauuugaaggaagc

SEQ ID NO: 1636 - DNA, 23 bp, Artificial Sequence
  Description of Artificial Sequence: Synthetic oligonucleotide
  Description of Combined DNA/RNA Molecule: Synthetic oligonucleotide
uuuaagtuuacggaauuucaaca

SEQ ID NO: 1637 - DNA, 23 bp, Artificial Sequence
  Description of Artificial Sequence: Synthetic oligonucleotide
  Description of Combined DNA/RNA Molecule: Synthetic oligonucleotide
uauacutggcuguaugagugucg

SEQ ID NO: 1638 - RNA, 23 nt, Artificial Sequence
  Description of Artificial Sequence: Synthetic oligonucleotide
uucaccaagguagaucugugcuu

SEQ ID NO: 1639 - RNA, 23 nt, Artificial Sequence
  Description of Artificial Sequence: Synthetic oligonucleotide
uaucaaacuccacguugaaagca

SEQ ID NO: 1640 - RNA, 23 nt, Artificial Sequence
  Description of Artificial Sequence: Synthetic oligonucleotide
ugguagaucugugcuuagcuaaa

SEQ ID NO: 1641 - RNA, 23 nt, Artificial Sequence
  Description of Artificial Sequence: Synthetic oligonucleotide
uaaauauacucuguaucacaacu

SEQ ID NO: 1642 - RNA, 23 nt, Artificial Sequence
  Description of Artificial Sequence: Synthetic oligonucleotide
uucauacuuggcuguaugagugu

SEQ ID NO: 1643 - DNA, 23 bp, Artificial Sequence
  Description of Artificial Sequence: Synthetic oligonucleotide
  Description of Combined DNA/RNA Molecule: Synthetic oligonucleotide
uuuacctgauuugccuuaacuag

SEQ ID NO: 1644 - RNA, 23 nt, Artificial Sequence
  Description of Artificial Sequence: Synthetic oligonucleotide
uaauauacucuguaucacaacuc

SEQ ID NO: 1645 - RNA, 23 nt, Artificial Sequence
  Description of Artificial Sequence: Synthetic oligonucleotide
ucuguaugagugucgaugucaac

SEQ ID NO: 1646 - DNA, 23 bp, Artificial Sequence
  Description of Artificial Sequence: Synthetic oligonucleotide
  Description of Combined DNA/RNA Molecule: Synthetic oligonucleotide
uuuaactagcucaauuuaucuug

SEQ ID NO: 1647 - RNA, 23 nt, Artificial Sequence
  Description of Artificial Sequence: Synthetic oligonucleotide
uaaccuucaaaaaaauaccuaga

SEQ ID NO: 1648 - DNA, 23 bp, Artificial Sequence
  Description of Artificial Sequence: Synthetic oligonucleotide
  Description of Combined DNA/RNA Molecule: Synthetic oligonucleotide
uaaccutcaaaaaaauaccuaga

SEQ ID NO: 1649 - RNA, 23 nt, Artificial Sequence
  Description of Artificial Sequence: Synthetic oligonucleotide
ucuaccauaaacaaagcaccaac

SEQ ID NO: 1650 - RNA, 23 nt, Artificial Sequence
  Description of Artificial Sequence: Synthetic oligonucleotide
ugaaauauacucuguaucacaac

SEQ ID NO: 1651 - DNA, 23 bp, Artificial Sequence
  Description of Artificial Sequence: Synthetic oligonucleotide
  Description of Combined DNA/RNA Molecule: Synthetic oligonucleotide
uaggtcacacauuccagaagagg

SEQ ID NO: 1652 - RNA, 23 nt, Artificial Sequence
  Description of Artificial Sequence: Synthetic oligonucleotide
uaaaauaccuagaacggccaguc

SEQ ID NO: 1653 - DNA, 23 bp, Artificial Sequence
  Description of Artificial Sequence: Synthetic oligonucleotide
  Description of Combined DNA/RNA Molecule: Synthetic oligonucleotide
uucatgacuauuuuaccugauuu

SEQ ID NO: 1654 - DNA, 23 bp, Artificial Sequence
  Description of Artificial Sequence: Synthetic oligonucleotide
  Description of Combined DNA/RNA Molecule: Synthetic oligonucleotide
uugccctuuguuuuaauggaauc

SEQ ID NO: 1655 - DNA, 23 bp, Artificial Sequence
  Description of Artificial Sequence: Synthetic oligonucleotide
  Description of Combined DNA/RNA Molecule: Synthetic oligonucleotide
uuagtgaagucagcacucuugcc

SEQ ID NO: 1656 - RNA, 23 nt, Artificial Sequence
  Description of Artificial Sequence: Synthetic oligonucleotide
ucaucaaacuccacguugaaagc

SEQ ID NO: 1657 - RNA, 23 nt, Artificial Sequence
  Description of Artificial Sequence: Synthetic oligonucleotide
uuaccauaaacaaagcaccaacc

SEQ ID NO: 1658 - DNA, 23 bp, Artificial Sequence
  Description of Artificial Sequence: Synthetic oligonucleotide
  Description of Combined DNA/RNA Molecule: Synthetic oligonucleotide
uuaccataaacaaagcaccaacc

SEQ ID NO: 1659 - RNA, 23 nt, Artificial Sequence
  Description of Artificial Sequence: Synthetic oligonucleotide
ucauacuuggcuguaugaguguc

SEQ ID NO: 1660 - RNA, 23 nt, Artificial Sequence
  Description of Artificial Sequence: Synthetic oligonucleotide
uacaaagucaagguacuuuauuc

SEQ ID NO: 1661 - DNA, 23 bp, Artificial Sequence
  Description of Artificial Sequence: Synthetic oligonucleotide
  Description of Combined DNA/RNA Molecule: Synthetic oligonucleotide
ucuctgtaauucaaaagucauua

SEQ ID NO: 1662 - RNA, 23 nt, Artificial Sequence
  Description of Artificial Sequence: Synthetic oligonucleotide
uacauuacauagaaucaugacua

SEQ ID NO: 1663 - DNA, 23 bp, Artificial Sequence
  Description of Artificial Sequence: Synthetic oligonucleotide
  Description of Combined DNA/RNA Molecule: Synthetic oligonucleotide
uccutgagcacaauccaggucac

SEQ ID NO: 1664 - RNA, 23 nt, Artificial Sequence
  Description of Artificial Sequence: Synthetic oligonucleotide
ugcuguaugagugucgaugucaa

SEQ ID NO: 1665 - DNA, 23 bp, Artificial Sequence
  Description of Artificial Sequence: Synthetic oligonucleotide
  Description of Combined DNA/RNA Molecule: Synthetic oligonucleotide
ucuutgauuugccuguucuucag

SEQ ID NO: 1666 - DNA, 23 bp, Artificial Sequence
  Description of Artificial Sequence: Synthetic oligonucleotide
  Description of Combined DNA/RNA Molecule: Synthetic oligonucleotide
ugaatcaugacuauuuuaccuga

SEQ ID NO: 1667 - RNA, 23 nt, Artificial Sequence
  Description of Artificial Sequence: Synthetic oligonucleotide
uugugaacaaagucaagguacuu

SEQ ID NO: 1668 - RNA, 23 nt, Artificial Sequence
  Description of Artificial Sequence: Synthetic oligonucleotide
ucaaaaaaauaccuagaacggcc

SEQ ID NO: 1669 - RNA, 23 nt, Artificial Sequence
  Description of Artificial Sequence: Synthetic oligonucleotide
uagaaaaacuacuaccauaaaca

SEQ ID NO: 1670 - DNA, 23 bp, Artificial Sequence
  Description of Artificial Sequence: Synthetic oligonucleotide
  Description of Combined DNA/RNA Molecule: Synthetic oligonucleotide
ugagagtcaucaaacuccacguu

SEQ ID NO: 1671 - DNA, 23 bp, Artificial Sequence
  Description of Artificial Sequence: Synthetic oligonucleotide
  Description of Combined DNA/RNA Molecule: Synthetic oligonucleotide
uucatcaaacuccacguugaaag

SEQ ID NO: 1672 - DNA, 23 bp, Artificial Sequence
  Description of Artificial Sequence: Synthetic oligonucleotide
  Description of Combined DNA/RNA Molecule: Synthetic oligonucleotide
uuauactcuguaucacaacucua

SEQ ID NO: 1673 - RNA, 23 nt, Artificial Sequence
  Description of Artificial Sequence: Synthetic oligonucleotide
ucugugaacaaagucaagguacu

SEQ ID NO: 1674 - DNA, 23 bp, Artificial Sequence
  Description of Artificial Sequence: Synthetic oligonucleotide
  Description of Combined DNA/RNA Molecule: Synthetic oligonucleotide
ucugtgaacaaagucaagguacu

SEQ ID NO: 1675 - DNA, 23 bp, Artificial Sequence
  Description of Artificial Sequence: Synthetic oligonucleotide
  Description of Combined DNA/RNA Molecule: Synthetic oligonucleotide
uuactctguaucacaacucuaau

SEQ ID NO: 1676 - RNA, 23 nt, Artificial Sequence
  Description of Artificial Sequence: Synthetic oligonucleotide
ugugcuauggauuugcacucaac

SEQ ID NO: 1677 - RNA, 23 nt, Artificial Sequence
  Description of Artificial Sequence: Synthetic oligonucleotide
uugacuauuuuaccugauuugcc

SEQ ID NO: 1678 - RNA, 23 nt, Artificial Sequence
  Description of Artificial Sequence: Synthetic oligonucleotide
uaccaagguagaucugugcuuag

SEQ ID NO: 1679 - RNA, 23 nt, Artificial Sequence
  Description of Artificial Sequence: Synthetic oligonucleotide
ucuacaugcugugaacaaaguca

SEQ ID NO: 1680 - RNA, 23 nt, Artificial Sequence
  Description of Artificial Sequence: Synthetic oligonucleotide
uaaaaauaccuagaacggccagu

SEQ ID NO: 1681 - RNA, 23 nt, Artificial Sequence
  Description of Artificial Sequence: Synthetic oligonucleotide
uagggaagggucauacuuggcug

SEQ ID NO: 1682 - RNA, 23 nt, Artificial Sequence
  Description of Artificial Sequence: Synthetic oligonucleotide
uacagaaaaacuacuaccauaaa

SEQ ID NO: 1683 - DNA, 23 bp, Artificial Sequence
  Description of Artificial Sequence: Synthetic oligonucleotide
  Description of Combined DNA/RNA Molecule: Synthetic oligonucleotide
uuugcctuaacuagcucaauuua

SEQ ID NO: 1684 - RNA, 23 nt, Artificial Sequence
  Description of Artificial Sequence: Synthetic oligonucleotide
uuuuaaaagcagcauuuuaguca

SEQ ID NO: 1685 - DNA, 23 bp, Artificial Sequence
  Description of Artificial Sequence: Synthetic oligonucleotide
  Description of Combined DNA/RNA Molecule: Synthetic oligonucleotide
uuccagtgaaccaagugaaguuc

SEQ ID NO: 1686 - RNA, 23 nt, Artificial Sequence
  Description of Artificial Sequence: Synthetic oligonucleotide
uccuucaaaaaaauaccuagaac

SEQ ID NO: 1687 - RNA, 23 nt, Artificial Sequence
  Description of Artificial Sequence: Synthetic oligonucleotide
ucaccaagguagaucugugcuua

SEQ ID NO: 1688 - RNA, 23 nt, Artificial Sequence
  Description of Artificial Sequence: Synthetic oligonucleotide
uaaaaaaauaccuagaacggcca

SEQ ID NO: 1689 - RNA, 23 nt, Artificial Sequence
  Description of Artificial Sequence: Synthetic oligonucleotide
uuuuuaaaagcagcauuuuaguc

SEQ ID NO: 1690 - DNA, 23 bp, Artificial Sequence
  Description of Artificial Sequence: Synthetic oligonucleotide
  Description of Combined DNA/RNA Molecule: Synthetic oligonucleotide
uaagcutugauuugccuguucuu

SEQ ID NO: 1691 - RNA, 23 nt, Artificial Sequence
  Description of Artificial Sequence: Synthetic oligonucleotide
ucuacuaccauaaacaaagcacc

SEQ ID NO: 1692 - RNA, 23 nt, Artificial Sequence
  Description of Artificial Sequence: Synthetic oligonucleotide
uucuguaucacaacucuaauuau

SEQ ID NO: 1693 - RNA, 23 nt, Artificial Sequence
  Description of Artificial Sequence: Synthetic oligonucleotide
uauaaacaaagcaccaaccagcc

SEQ ID NO: 1694 - RNA, 23 nt, Artificial Sequence
  Description of Artificial Sequence: Synthetic oligonucleotide
uggaccaucuuauuugaaggaag

SEQ ID NO: 1695 - RNA, 23 nt, Artificial Sequence
  Description of Artificial Sequence: Synthetic oligonucleotide
ucaaggauucaggaaggaggcca

SEQ ID NO: 1696 - DNA, 23 bp, Artificial Sequence
  Description of Artificial Sequence: Synthetic oligonucleotide
  Description of Combined DNA/RNA Molecule: Synthetic oligonucleotide
uggutuacauuacauagaaucau

SEQ ID NO: 1697 - RNA, 23 nt, Artificial Sequence
  Description of Artificial Sequence: Synthetic oligonucleotide
ucauaaacaaagcaccaaccagc

SEQ ID NO: 1698 - RNA, 23 nt, Artificial Sequence
  Description of Artificial Sequence: Synthetic oligonucleotide
ugucauacuuggcuguaugagug

SEQ ID NO: 1699 - DNA, 23 bp, Artificial Sequence
  Description of Artificial Sequence: Synthetic oligonucleotide
  Description of Combined DNA/RNA Molecule: Synthetic oligonucleotide
uuuggctguaugagugucgaugu

SEQ ID NO: 1700 - DNA, 23 bp, Artificial Sequence
  Description of Artificial Sequence: Synthetic oligonucleotide
  Description of Combined DNA/RNA Molecule: Synthetic oligonucleotide
uggaagtccuuaugccagugcuc

SEQ ID NO: 1701 - DNA, 23 bp, Artificial Sequence
  Description of Artificial Sequence: Synthetic oligonucleotide
  Description of Combined DNA/RNA Molecule: Synthetic oligonucleotide
ugagtcaucaaacuccacguuga

SEQ ID NO: 1702 - RNA, 23 nt, Artificial Sequence
  Description of Artificial Sequence: Synthetic oligonucleotide
ugacuauuuuaccugauuugccu

SEQ ID NO: 1703 - DNA, 23 bp, Artificial Sequence
  Description of Artificial Sequence: Synthetic oligonucleotide
  Description of Combined DNA/RNA Molecule: Synthetic oligonucleotide
ugactatuuuaccugauuugccu

SEQ ID NO: 1704 - RNA, 23 nt, Artificial Sequence
  Description of Artificial Sequence: Synthetic oligonucleotide
uacaucaacaacuuucugaaggc

SEQ ID NO: 1705 - DNA, 23 bp, Artificial Sequence
  Description of Artificial Sequence: Synthetic oligonucleotide
  Description of Combined DNA/RNA Molecule: Synthetic oligonucleotide
uacatcaacaacuuucugaaggc

SEQ ID NO: 1706 - DNA, 23 bp, Artificial Sequence
  Description of Artificial Sequence: Synthetic oligonucleotide
  Description of Combined DNA/RNA Molecule: Synthetic oligonucleotide
uaugactauuuuaccugauuugc

SEQ ID NO: 1707 - RNA, 23 nt, Artificial Sequence
  Description of Artificial Sequence: Synthetic oligonucleotide
ucuauuuuaccugauuugccuua

SEQ ID NO: 1708 - DNA, 23 bp, Artificial Sequence
  Description of Artificial Sequence: Synthetic oligonucleotide
  Description of Combined DNA/RNA Molecule: Synthetic oligonucleotide
uugaagtcagcacucuugcccuu

SEQ ID NO: 1709 - RNA, 23 nt, Artificial Sequence
  Description of Artificial Sequence: Synthetic oligonucleotide
uaaaaaauaccuagaacggccag

SEQ ID NO: 1710 - RNA, 23 nt, Artificial Sequence
  Description of Artificial Sequence: Synthetic oligonucleotide
uaacaacuuucugaaggcccggu

SEQ ID NO: 1711 - RNA, 23 nt, Artificial Sequence
  Description of Artificial Sequence: Synthetic oligonucleotide
uacuauuuuaccugauuugccuu

SEQ ID NO: 1712 - RNA, 23 nt, Artificial Sequence
  Description of Artificial Sequence: Synthetic oligonucleotide
ugaccauuguugaggauccucag

SEQ ID NO: 1713 - DNA, 23 bp, Artificial Sequence
  Description of Artificial Sequence: Synthetic oligonucleotide
  Description of Combined DNA/RNA Molecule: Synthetic oligonucleotide
ugaccatuguugaggauccucag

SEQ ID NO: 1714 - RNA, 23 nt, Artificial Sequence
  Description of Artificial Sequence: Synthetic oligonucleotide
uguuccagugaaccaagugaagu

SEQ ID NO: 1715 - DNA, 23 bp, Artificial Sequence
  Description of Artificial Sequence: Synthetic oligonucleotide
  Description of Combined DNA/RNA Molecule: Synthetic oligonucleotide
uagutgtccaccaucaguucuuc

SEQ ID NO: 1716 - RNA, 23 nt, Artificial Sequence
  Description of Artificial Sequence: Synthetic oligonucleotide
ucaaagucaagguacuuuauucu

SEQ ID NO: 1717 - DNA, 23 bp, Artificial Sequence
  Description of Artificial Sequence: Synthetic oligonucleotide
  Description of Combined DNA/RNA Molecule: Synthetic oligonucleotide
ucaaagtcaagguacuuuauucu

SEQ ID NO: 1718 - RNA, 23 nt, Artificial Sequence
  Description of Artificial Sequence: Synthetic oligonucleotide
uccuacaugcugugaacaaaguc

SEQ ID NO: 1719 - DNA, 23 bp, Artificial Sequence
  Description of Artificial Sequence: Synthetic oligonucleotide
  Description of Combined DNA/RNA Molecule: Synthetic oligonucleotide
ucaaggtacuuuauucuuauuuc

SEQ ID NO: 1720 - DNA, 23 bp, Artificial Sequence
  Description of Artificial Sequence: Synthetic oligonucleotide
  Description of Combined DNA/RNA Molecule: Synthetic oligonucleotide
uugugutacagaaaaacuacuac

SEQ ID NO: 1721 - RNA, 23 nt, Artificial Sequence
  Description of Artificial Sequence: Synthetic oligonucleotide
ucagggaagggucauacuuggcu

SEQ ID NO: 1722 - DNA, 23 bp, Artificial Sequence
  Description of Artificial Sequence: Synthetic oligonucleotide
  Description of Combined DNA/RNA Molecule: Synthetic oligonucleotide
uugctatggauuugcacucaacc

SEQ ID NO: 1723 - RNA, 23 nt, Artificial Sequence
  Description of Artificial Sequence: Synthetic oligonucleotide
uucaacaacuuucugaaggcccg

SEQ ID NO: 1724 - RNA, 23 nt, Artificial Sequence
  Description of Artificial Sequence: Synthetic oligonucleotide
uugaccauuguugaggauccuca

SEQ ID NO: 1725 - DNA, 23 bp, Artificial Sequence
  Description of Artificial Sequence: Synthetic oligonucleotide
  Description of Combined DNA/RNA Molecule: Synthetic oligonucleotide
ucuctgtaucacaacucuaauua

SEQ ID NO: 1726 - DNA, 23 bp, Artificial Sequence
  Description of Artificial Sequence: Synthetic oligonucleotide
  Description of Combined DNA/RNA Molecule: Synthetic oligonucleotide
uagucatcaaacuccacguugaa

SEQ ID NO: 1727 - DNA, 23 bp, Artificial Sequence
  Description of Artificial Sequence: Synthetic oligonucleotide
  Description of Combined DNA/RNA Molecule: Synthetic oligonucleotide
uauctctguaauucaaaagucau

SEQ ID NO: 1728 - RNA, 23 nt, Artificial Sequence
  Description of Artificial Sequence: Synthetic oligonucleotide
uaccauuguugaggauccucagg

SEQ ID NO: 1729 - DNA, 23 bp, Artificial Sequence
  Description of Artificial Sequence: Synthetic oligonucleotide
  Description of Combined DNA/RNA Molecule: Synthetic oligonucleotide
uucctgagagucaucaaacucca

SEQ ID NO: 1730 - DNA, 23 bp, Artificial Sequence
  Description of Artificial Sequence: Synthetic oligonucleotide
  Description of Combined DNA/RNA Molecule: Synthetic oligonucleotide
uuactutccuauguuuuaaaagc

SEQ ID NO: 1731 - RNA, 23 nt, Artificial Sequence
  Description of Artificial Sequence: Synthetic oligonucleotide
ucagaaaaacuacuaccauaaac

SEQ ID NO: 1732 - RNA, 23 nt, Artificial Sequence
  Description of Artificial Sequence: Synthetic oligonucleotide
uccagugaaccaagugaaguucu

SEQ ID NO: 1733 - DNA, 23 bp, Artificial Sequence
  Description of Artificial Sequence: Synthetic oligonucleotide
  Description of Combined DNA/RNA Molecule: Synthetic oligonucleotide
uugccutaacuagcucaauuuau

SEQ ID NO: 1734 - RNA, 23 nt, Artificial Sequence
  Description of Artificial Sequence: Synthetic oligonucleotide
uaaacuacuaccauaaacaaagc

SEQ ID NO: 1735 - DNA, 23 bp, Artificial Sequence
  Description of Artificial Sequence: Synthetic oligonucleotide
  Description of Combined DNA/RNA Molecule: Synthetic oligonucleotide
uaagtcagcacucuugcccuuug

SEQ ID NO: 1736 - RNA, 23 nt, Artificial Sequence
  Description of Artificial Sequence: Synthetic oligonucleotide
uccugagagucaucaaacuccac

SEQ ID NO: 1737 - RNA, 23 nt, Artificial Sequence
  Description of Artificial Sequence: Synthetic oligonucleotide
ucaacaacuuucugaaggcccgg

SEQ ID NO: 1738 - RNA, 23 nt, Artificial Sequence
  Description of Artificial Sequence: Synthetic oligonucleotide
uagugaagucagcacucuugccc

SEQ ID NO: 1739 - DNA, 23 bp, Artificial Sequence
  Description of Artificial Sequence: Synthetic oligonucleotide
  Description of Combined DNA/RNA Molecule: Synthetic oligonucleotide
uuugcctguucuucaguggcuga

SEQ ID NO: 1740 - RNA, 23 nt, Artificial Sequence
  Description of Artificial Sequence: Synthetic oligonucleotide
ugcccuuuguuuuaauggaaucc

SEQ ID NO: 1741 - DNA, 23 bp, Artificial Sequence
  Description of Artificial Sequence: Synthetic oligonucleotide
  Description of Combined DNA/RNA Molecule: Synthetic oligonucleotide
ugcccutuguuuuaauggaaucc

SEQ ID NO: 1742 - DNA, 23 bp, Artificial Sequence
  Description of Artificial Sequence: Synthetic oligonucleotide
  Description of Combined DNA/RNA Molecule: Synthetic oligonucleotide
ucugtgtuacagaaaaacuacua

SEQ ID NO: 1743 - RNA, 23 nt, Artificial Sequence
  Description of Artificial Sequence: Synthetic oligonucleotide
uccaaccuucaaaaaaauaccua

SEQ ID NO: 1744 - RNA, 23 nt, Artificial Sequence
  Description of Artificial Sequence: Synthetic oligonucleotide
uccgaagauucauuauuuggaua

SEQ ID NO: 1745 - DNA, 23 bp, Artificial Sequence
  Description of Artificial Sequence: Synthetic oligonucleotide
  Description of Combined DNA/RNA Molecule: Synthetic oligonucleotide
ucautctacuuuccuauguuuua

SEQ ID NO: 1746 - DNA, 23 bp, Artificial Sequence
  Description of Artificial Sequence: Synthetic oligonucleotide
  Description of Combined DNA/RNA Molecule: Synthetic oligonucleotide
uugctutguccugagagucauca

SEQ ID NO: 1747 - RNA, 23 nt, Artificial Sequence
  Description of Artificial Sequence: Synthetic oligonucleotide
ucugauuugccuuaacuagcuca

SEQ ID NO: 1748 - DNA, 23 bp, Artificial Sequence
  Description of Artificial Sequence: Synthetic oligonucleotide
  Description of Combined DNA/RNA Molecule: Synthetic oligonucleotide
ucautgtugaggauccucaggga

SEQ ID NO: 1749 - RNA, 23 nt, Artificial Sequence
  Description of Artificial Sequence: Synthetic oligonucleotide
uccauaaacaaagcaccaaccag

SEQ ID NO: 1750 - RNA, 23 nt, Artificial Sequence
  Description of Artificial Sequence: Synthetic oligonucleotide
ucaaccuucaaaaaaauaccuag

SEQ ID NO: 1751 - RNA, 23 nt, Artificial Sequence
  Description of Artificial Sequence: Synthetic oligonucleotide
ugggaaacacccgaagauucauu

SEQ ID NO: 1752 - RNA, 23 nt, Artificial Sequence
  Description of Artificial Sequence: Synthetic oligonucleotide
uguguuacagaaaaacuacuacc

SEQ ID NO: 1753 - DNA, 23 bp, Artificial Sequence
  Description of Artificial Sequence: Synthetic oligonucleotide
  Description of Combined DNA/RNA Molecule: Synthetic oligonucleotide
ugugtuacagaaaaacuacuacc

SEQ ID NO: 1754 - DNA, 23 bp, Artificial Sequence
  Description of Artificial Sequence: Synthetic oligonucleotide
  Description of Combined DNA/RNA Molecule: Synthetic oligonucleotide
uugucctgagagucaucaaacuc

SEQ ID NO: 1755 - RNA, 23 nt, Artificial Sequence
  Description of Artificial Sequence: Synthetic oligonucleotide
ugaaacacccgaagauucauuau

SEQ ID NO: 1756 - RNA, 23 nt, Artificial Sequence
  Description of Artificial Sequence: Synthetic oligonucleotide
uacccgaagauucauuauuugga

SEQ ID NO: 1757 - RNA, 23 nt, Artificial Sequence
  Description of Artificial Sequence: Synthetic oligonucleotide
ucccuacaugcugugaacaaagu

SEQ ID NO: 1758 - DNA, 23 bp, Artificial Sequence
  Description of Artificial Sequence: Synthetic oligonucleotide
  Description of Combined DNA/RNA Molecule: Synthetic oligonucleotide
uaugggtuccuugagcacaaucc

SEQ ID NO: 1759 - RNA, 23 nt, Artificial Sequence
  Description of Artificial Sequence: Synthetic oligonucleotide
uaccauaaacaaagcaccaacca

SEQ ID NO: 1760 - RNA, 23 nt, Artificial Sequence
  Description of Artificial Sequence: Synthetic oligonucleotide
uagggaaacacccgaagauucau

SEQ ID NO: 1761 - RNA, 23 nt, Artificial Sequence
  Description of Artificial Sequence: Synthetic oligonucleotide
uguuacagaaaaacuacuaccau

SEQ ID NO: 1762 - RNA, 23 nt, Artificial Sequence
  Description of Artificial Sequence: Synthetic oligonucleotide
uagcuuugauuugccuguucuuc

SEQ ID NO: 1763 - DNA, 23 bp, Artificial Sequence
  Description of Artificial Sequence: Synthetic oligonucleotide
  Description of Combined DNA/RNA Molecule: Synthetic oligonucleotide
uagctutgauuugccuguucuuc

SEQ ID NO: 1764 - RNA, 23 nt, Artificial Sequence
  Description of Artificial Sequence: Synthetic oligonucleotide
ucauagaaucaugacuauuuuac

SEQ ID NO: 1765 - RNA, 23 nt, Artificial Sequence
  Description of Artificial Sequence: Synthetic oligonucleotide
uaaauaccuagaacggccagucc

SEQ ID NO: 1766 - DNA, 23 bp, Artificial Sequence
  Description of Artificial Sequence: Synthetic oligonucleotide
  Description of Combined DNA/RNA Molecule: Synthetic oligonucleotide
uauugutgaggauccucagggaa

SEQ ID NO: 1767 - RNA, 23 nt, Artificial Sequence
  Description of Artificial Sequence: Synthetic oligonucleotide
uuaaacaaagcaccaaccagcca

SEQ ID NO: 1768 - RNA, 23 nt, Artificial Sequence
  Description of Artificial Sequence: Synthetic oligonucleotide
uagcacaucaacaacuuucugaa

SEQ ID NO: 1769 - RNA, 23 nt, Artificial Sequence
  Description of Artificial Sequence: Synthetic oligonucleotide
uccacgaggaucgaaguuaguga

SEQ ID NO: 1770 - RNA, 23 nt, Artificial Sequence
  Description of Artificial Sequence: Synthetic oligonucleotide
ucaucaacaacuuucugaaggcc

SEQ ID NO: 1771 - DNA, 23 bp, Artificial Sequence
  Description of Artificial Sequence: Synthetic oligonucleotide
  Description of Combined DNA/RNA Molecule: Synthetic oligonucleotide
uagucctuaugccagugcucagg

SEQ ID NO: 1772 - DNA, 23 bp, Artificial Sequence
  Description of Artificial Sequence: Synthetic oligonucleotide
  Description of Combined DNA/RNA Molecule: Synthetic oligonucleotide
uacctgauuugccuuaacuagcu

SEQ ID NO: 1773 - RNA, 23 nt, Artificial Sequence
  Description of Artificial Sequence: Synthetic oligonucleotide
uccauuguugaggauccucaggg

SEQ ID NO: 1774 - RNA, 23 nt, Artificial Sequence
  Description of Artificial Sequence: Synthetic oligonucleotide
ugaaaaacuacuaccauaaacaa

SEQ ID NO: 1775 - RNA, 23 nt, Artificial Sequence
  Description of Artificial Sequence: Synthetic oligonucleotide
uugagcacaauccaggucacaca

SEQ ID NO: 1776 - DNA, 23 bp, Artificial Sequence
  Description of Artificial Sequence: Synthetic oligonucleotide
  Description of Combined DNA/RNA Molecule: Synthetic oligonucleotide
uggctgtaugagugucgauguca

SEQ ID NO: 1777 - DNA, 23 bp, Artificial Sequence
  Description of Artificial Sequence: Synthetic oligonucleotide
  Description of Combined DNA/RNA Molecule: Synthetic oligonucleotide
uugggutccuugagcacaaucca

SEQ ID NO: 1778 - DNA, 23 bp, Artificial Sequence
  Description of Artificial Sequence: Synthetic oligonucleotide
  Description of Combined DNA/RNA Molecule: Synthetic oligonucleotide
uggucatacuuggcuguaugagu

SEQ ID NO: 1779 - RNA, 23 nt, Artificial Sequence
  Description of Artificial Sequence: Synthetic oligonucleotide
uauagaaucaugacuauuuuacc

SEQ ID NO: 1780 - RNA, 23 nt, Artificial Sequence
  Description of Artificial Sequence: Synthetic oligonucleotide
ucugauggguuccuugagcacaa

SEQ ID NO: 1781 - RNA, 23 nt, Artificial Sequence
  Description of Artificial Sequence: Synthetic oligonucleotide
uuguccaccaucaguucuucggg

SEQ ID NO: 1782 - DNA, 23 bp, Artificial Sequence
  Description of Artificial Sequence: Synthetic oligonucleotide
  Description of Combined DNA/RNA Molecule: Synthetic oligonucleotide
uucuagtcuucacauuuuauuag

SEQ ID NO: 1783 - RNA, 23 nt, Artificial Sequence
  Description of Artificial Sequence: Synthetic oligonucleotide
uaaacaaagcaccaaccagccac

SEQ ID NO: 1784 - RNA, 23 nt, Artificial Sequence
  Description of Artificial Sequence: Synthetic oligonucleotide
uacccuacaugcugugaacaaag

SEQ ID NO: 1785 - RNA, 23 nt, Artificial Sequence
  Description of Artificial Sequence: Synthetic oligonucleotide
uaugggaccaucuuauuugaagg

SEQ ID NO: 1786 - RNA, 23 nt, Artificial Sequence
  Description of Artificial Sequence: Synthetic oligonucleotide
ucuacuuuccuauguuuuaaaag

SEQ ID NO: 1787 - RNA, 23 nt, Artificial Sequence
  Description of Artificial Sequence: Synthetic oligonucleotide
uaaaacuacuaccauaaacaaag

SEQ ID NO: 1788 - DNA, 23 bp, Artificial Sequence
  Description of Artificial Sequence: Synthetic oligonucleotide
  Description of Combined DNA/RNA Molecule: Synthetic oligonucleotide
uaaaactacuaccauaaacaaag

SEQ ID NO: 1789 - RNA, 23 nt, Artificial Sequence
  Description of Artificial Sequence: Synthetic oligonucleotide
uccugauuugccuuaacuagcuc

SEQ ID NO: 1790 - RNA, 23 nt, Artificial Sequence
  Description of Artificial Sequence: Synthetic oligonucleotide
uuagaaucaugacuauuuuaccu

SEQ ID NO: 1791 - DNA, 23 bp, Artificial Sequence
  Description of Artificial Sequence: Synthetic oligonucleotide
  Description of Combined DNA/RNA Molecule: Synthetic oligonucleotide
uuagaatcaugacuauuuuaccu

SEQ ID NO: 1792 - RNA, 23 nt, Artificial Sequence
  Description of Artificial Sequence: Synthetic oligonucleotide
uaauaccuagaacggccagucca

SEQ ID NO: 1793 - DNA, 23 bp, Artificial Sequence
  Description of Artificial Sequence: Synthetic oligonucleotide
  Description of Combined DNA/RNA Molecule: Synthetic oligonucleotide
ugcctgtucuucaguggcugagc

SEQ ID NO: 1794 - RNA, 23 nt, Artificial Sequence
  Description of Artificial Sequence: Synthetic oligonucleotide
uaauccaggucacacauuccaga

SEQ ID NO: 1795 - RNA, 23 nt, Artificial Sequence
  Description of Artificial Sequence: Synthetic oligonucleotide
ucaucacccuacaugcugugaac

SEQ ID NO: 1796 - DNA, 23 bp, Artificial Sequence
  Description of Artificial Sequence: Synthetic oligonucleotide
  Description of Combined DNA/RNA Molecule: Synthetic oligonucleotide
uaagggtcauacuuggcuguaug

SEQ ID NO: 1797 - RNA, 23 nt, Artificial Sequence
  Description of Artificial Sequence: Synthetic oligonucleotide
uguccuuaugccagugcucaggu

SEQ ID NO: 1798 - DNA, 23 bp, Artificial Sequence
  Description of Artificial Sequence: Synthetic oligonucleotide
  Description of Combined DNA/RNA Molecule: Synthetic oligonucleotide
uguccutaugccagugcucaggu

SEQ ID NO: 1799 - DNA, 23 bp, Artificial Sequence
  Description of Artificial Sequence: Synthetic oligonucleotide
  Description of Combined DNA/RNA Molecule: Synthetic oligonucleotide
ucgctgauggguuccuugagcac

SEQ ID NO: 1800 - DNA, 23 bp, Artificial Sequence
  Description of Artificial Sequence: Synthetic oligonucleotide
  Description of Combined DNA/RNA Molecule: Synthetic oligonucleotide
uccaggtcacacauuccagaaga

SEQ ID NO: 1801 - RNA, 23 nt, Artificial Sequence
  Description of Artificial Sequence: Synthetic oligonucleotide
ugccuuaacuagcucaauuuauc

SEQ ID NO: 1802 - RNA, 23 nt, Artificial Sequence
  Description of Artificial Sequence: Synthetic oligonucleotide
uugccaaccuucaaaaaaauacc

SEQ ID NO: 1803 - RNA, 23 nt, Artificial Sequence
  Description of Artificial Sequence: Synthetic oligonucleotide
ucuguaucacaacucuaauuaua

SEQ ID NO: 1804 - DNA, 23 bp, Artificial Sequence
  Description of Artificial Sequence: Synthetic oligonucleotide
  Description of Combined DNA/RNA Molecule: Synthetic oligonucleotide
ucugtatcacaacucuaauuaua

SEQ ID NO: 1805 - RNA, 23 nt, Artificial Sequence
  Description of Artificial Sequence: Synthetic oligonucleotide
ucugcuuuguccugagagucauc

SEQ ID NO: 1806 - DNA, 23 bp, Artificial Sequence
  Description of Artificial Sequence: Synthetic oligonucleotide
  Description of Combined DNA/RNA Molecule: Synthetic oligonucleotide
ucugcutuguccugagagucauc

SEQ ID NO: 1807 - DNA, 23 bp, Artificial Sequence
  Description of Artificial Sequence: Synthetic oligonucleotide
  Description of Combined DNA/RNA Molecule: Synthetic oligonucleotide
ugggtcauacuuggcuguaugag

SEQ ID NO: 1808 - RNA, 23 nt, Artificial Sequence
  Description of Artificial Sequence: Synthetic oligonucleotide
ugccaaccuucaaaaaaauaccu

SEQ ID NO: 1809 - DNA, 23 bp, Artificial Sequence
  Description of Artificial Sequence: Synthetic oligonucleotide
  Description of Combined DNA/RNA Molecule: Synthetic oligonucleotide
uucatcacccuacaugcugugaa

SEQ ID NO: 1810 - DNA, 23 bp, Artificial Sequence
  Description of Artificial Sequence: Synthetic oligonucleotide
  Description of Combined DNA/RNA Molecule: Synthetic oligonucleotide
uguatcacaacucuaauuauaac

SEQ ID NO: 1811 - RNA, 23 nt, Artificial Sequence
  Description of Artificial Sequence: Synthetic oligonucleotide
uugcacagcuuucccaaaauccc

SEQ ID NO: 1812 - DNA, 23 bp, Artificial Sequence
  Description of Artificial Sequence: Synthetic oligonucleotide
  Description of Combined DNA/RNA Molecule: Synthetic oligonucleotide
ucactctugcccuuuguuuuaau

SEQ ID NO: 1813 - RNA, 23 nt, Artificial Sequence
  Description of Artificial Sequence: Synthetic oligonucleotide
ugacgcugauggguuccuugagc

SEQ ID NO: 1814 - DNA, 23 bp, Artificial Sequence
  Description of Artificial Sequence: Synthetic oligonucleotide
  Description of Combined DNA/RNA Molecule: Synthetic oligonucleotide
ugacgctgauggguuccuugagc

SEQ ID NO: 1815 - RNA, 23 nt, Artificial Sequence
  Description of Artificial Sequence: Synthetic oligonucleotide
ugcacaucaacaacuuucugaag

SEQ ID NO: 1816 - DNA, 23 bp, Artificial Sequence
  Description of Artificial Sequence: Synthetic oligonucleotide
  Description of Combined DNA/RNA Molecule: Synthetic oligonucleotide
ugcacatcaacaacuuucugaag

SEQ ID NO: 1817 - RNA, 23 nt, Artificial Sequence
  Description of Artificial Sequence: Synthetic oligonucleotide
ucccgaagauucauuauuuggau

SEQ ID NO: 1818 - DNA, 23 bp, Artificial Sequence
  Description of Artificial Sequence: Synthetic oligonucleotide
  Description of Combined DNA/RNA Molecule: Synthetic oligonucleotide
uugctcaucacccuacaugcugu

SEQ ID NO: 1819 - RNA, 23 nt, Artificial Sequence
  Description of Artificial Sequence: Synthetic oligonucleotide
ucuuaacuagcucaauuuaucuu

SEQ ID NO: 1820 - RNA, 23 nt, Artificial Sequence
  Description of Artificial Sequence: Synthetic oligonucleotide
uccuguucuucaguggcugagcu

SEQ ID NO: 1821 - DNA, 23 bp, Artificial Sequence
  Description of Artificial Sequence: Synthetic oligonucleotide
  Description of Combined DNA/RNA Molecule: Synthetic oligonucleotide
uccugutcuucaguggcugagcu

SEQ ID NO: 1822 - DNA, 23 bp, Artificial Sequence
  Description of Artificial Sequence: Synthetic oligonucleotide
  Description of Combined DNA/RNA Molecule: Synthetic oligonucleotide
ugcucatcacccuacaugcugug

SEQ ID NO: 1823 - RNA, 23 nt, Artificial Sequence
  Description of Artificial Sequence: Synthetic oligonucleotide
uaacacccgaagauucauuauuu

SEQ ID NO: 1824 - DNA, 23 bp, Artificial Sequence
  Description of Artificial Sequence: Synthetic oligonucleotide
  Description of Combined DNA/RNA Molecule: Synthetic oligonucleotide
uugctgacgcugauggguuccuu

SEQ ID NO: 1825 - RNA, 23 nt, Artificial Sequence
  Description of Artificial Sequence: Synthetic oligonucleotide
ucacccuacaugcugugaacaaa

SEQ ID NO: 1826 - DNA, 23 bp, Artificial Sequence
  Description of Artificial Sequence: Synthetic oligonucleotide
  Description of Combined DNA/RNA Molecule: Synthetic oligonucleotide
uagcactcuugcccuuuguuuua

SEQ ID NO: 1827 - RNA, 23 nt, Artificial Sequence
  Description of Artificial Sequence: Synthetic oligonucleotide
uagcacaauccaggucacacauu

SEQ ID NO: 1828 - RNA, 23 nt, Artificial Sequence
  Description of Artificial Sequence: Synthetic oligonucleotide
uacacccgaagauucauuauuug

SEQ ID NO: 1829 - RNA, 23 nt, Artificial Sequence
  Description of Artificial Sequence: Synthetic oligonucleotide
ucugccaaccuucaaaaaaauac

SEQ ID NO: 1830 - DNA, 23 bp, Artificial Sequence
  Description of Artificial Sequence: Synthetic oligonucleotide
  Description of Combined DNA/RNA Molecule: Synthetic oligonucleotide
ugcugatggguuccuugagcaca

SEQ ID NO: 1831 - RNA, 23 nt, Artificial Sequence
  Description of Artificial Sequence: Synthetic oligonucleotide
uaaacacccgaagauucauuauu

SEQ ID NO: 1832 - RNA, 23 nt, Artificial Sequence
  Description of Artificial Sequence: Synthetic oligonucleotide
uacaaagcaccaaccagccacag

SEQ ID NO: 1833 - RNA, 23 nt, Artificial Sequence
  Description of Artificial Sequence: Synthetic oligonucleotide
ucugacgcugauggguuccuuga

SEQ ID NO: 1834 - DNA, 23 bp, Artificial Sequence
  Description of Artificial Sequence: Synthetic oligonucleotide
  Description of Combined DNA/RNA Molecule: Synthetic oligonucleotide
uacucutgcccuuuguuuuaaug

SEQ ID NO: 1835 - RNA, 23 nt, Artificial Sequence
  Description of Artificial Sequence: Synthetic oligonucleotide
uaaagcaccaaccagccacagca

SEQ ID NO: 1836 - DNA, 23 bp, Artificial Sequence
  Description of Artificial Sequence: Synthetic oligonucleotide
  Description of Combined DNA/RNA Molecule: Synthetic oligonucleotide
uguucutcaguggcugagcuggg

SEQ ID NO: 1837 - RNA, 23 nt, Artificial Sequence
  Description of Artificial Sequence: Synthetic oligonucleotide
ucacccgaagauucauuauuugg

SEQ ID NO: 1838 - RNA, 23 nt, Artificial Sequence
  Description of Artificial Sequence: Synthetic oligonucleotide
uacaauccaggucacacauucca

SEQ ID NO: 1839 - DNA, 23 bp, Artificial Sequence
  Description of Artificial Sequence: Synthetic oligonucleotide
  Description of Combined DNA/RNA Molecule: Synthetic oligonucleotide
uagugctcaucacccuacaugcu

SEQ ID NO: 1840 - DNA, 23 bp, Artificial Sequence
  Description of Artificial Sequence: Synthetic oligonucleotide
  Description of Combined DNA/RNA Molecule: Synthetic oligonucleotide
uauacctagaacggccaguccau

SEQ ID NO: 1841 - RNA, 23 nt, Artificial Sequence
  Description of Artificial Sequence: Synthetic oligonucleotide
uccuuaacuagcucaauuuaucu

SEQ ID NO: 1842 - RNA, 23 nt, Artificial Sequence
  Description of Artificial Sequence: Synthetic oligonucleotide
uccagcacaucaacaacuuucug

SEQ ID NO: 1843 - RNA, 23 nt, Artificial Sequence
  Description of Artificial Sequence: Synthetic oligonucleotide
ucagcacucuugcccuuuguuuu

SEQ ID NO: 1844 - DNA, 23 bp, Artificial Sequence
  Description of Artificial Sequence: Synthetic oligonucleotide
  Description of Combined DNA/RNA Molecule: Synthetic oligonucleotide
uucctuaugccagugcucagguc

SEQ ID NO: 1845 - RNA, 23 nt, Artificial Sequence
  Description of Artificial Sequence: Synthetic oligonucleotide
ugcgccaguuguccaccaucagu

SEQ ID NO: 1846 - RNA, 23 nt, Artificial Sequence
  Description of Artificial Sequence: Synthetic oligonucleotide
uucagcacucuugcccuuuguuu

SEQ ID NO: 1847 - RNA, 23 nt, Artificial Sequence
  Description of Artificial Sequence: Synthetic oligonucleotide
uaugccagugcucagguccguug

SEQ ID NO: 1848 - DNA, 23 bp, Artificial Sequence
  Description of Artificial Sequence: Synthetic oligonucleotide
  Description of Combined DNA/RNA Molecule: Synthetic oligonucleotide
uguugctgcacagcuuucccaaa

SEQ ID NO: 1849 - DNA, 23 bp, Artificial Sequence
  Description of Artificial Sequence: Synthetic oligonucleotide
  Description of Combined DNA/RNA Molecule: Synthetic oligonucleotide
ugcugctgacgcugauggguucc

SEQ ID NO: 1850 - DNA, 23 bp, Artificial Sequence
  Description of Artificial Sequence: Synthetic oligonucleotide
  Description of Combined DNA/RNA Molecule: Synthetic oligonucleotide
uugutctucaguggcugagcugg

SEQ ID NO: 1851 - DNA, 23 bp, Artificial Sequence
  Description of Artificial Sequence: Synthetic oligonucleotide
  Description of Combined DNA/RNA Molecule: Synthetic oligonucleotide
uagcgctgccaaccuucaaaaaa

SEQ ID NO: 1852 - DNA, 23 bp, Artificial Sequence
  Description of Artificial Sequence: Synthetic oligonucleotide
  Description of Combined DNA/RNA Molecule: Synthetic oligonucleotide
ugcutcagggaagggucauacuu

SEQ ID NO: 1853 - DNA, 23 bp, Artificial Sequence
  Description of Artificial Sequence: Synthetic oligonucleotide
  Description of Combined DNA/RNA Molecule: Synthetic oligonucleotide
uuggtcagugagccuggguaggu

SEQ ID NO: 1854 - DNA, 23 bp, Artificial Sequence
  Description of Artificial Sequence: Synthetic oligonucleotide
  Description of Combined DNA/RNA Molecule: Synthetic oligonucleotide
ugguggtcagugagccuggguag

SEQ ID NO: 1855 - RNA, 23 nt, Artificial Sequence
  Description of Artificial Sequence: Synthetic oligonucleotide
uaccuagaacggccaguccauca

SEQ ID NO: 1856 - RNA, 23 nt, Artificial Sequence
  Description of Artificial Sequence: Synthetic oligonucleotide
uccuuaugccagugcucaggucc

SEQ ID NO: 1857 - RNA, 23 nt, Artificial Sequence
  Description of Artificial Sequence: Synthetic oligonucleotide
ucucgcugcugacgcugaugggu

SEQ ID NO: 1858 - RNA, 23 nt, Artificial Sequence
  Description of Artificial Sequence: Synthetic oligonucleotide
uuaccuagaacggccaguccauc

SEQ ID NO: 1859 - RNA, 23 nt, Artificial Sequence
  Description of Artificial Sequence: Synthetic oligonucleotide
ugcugcacagcuuucccaaaauc

SEQ ID NO: 1860 - RNA, 23 nt, Artificial Sequence
  Description of Artificial Sequence: Synthetic oligonucleotide
uuagaacggccaguccaucaggu

SEQ ID NO: 1861 - DNA, 23 bp, Artificial Sequence
  Description of Artificial Sequence: Synthetic oligonucleotide
  Description of Combined DNA/RNA Molecule: Synthetic oligonucleotide
ugucagtgagccuggguaggucc

SEQ ID NO: 1862 - DNA, 23 bp, Artificial Sequence
  Description of Artificial Sequence: Synthetic oligonucleotide
  Description of Combined DNA/RNA Molecule: Synthetic oligonucleotide
ucagtgagccuggguagguccag

SEQ ID NO: 1863 - RNA, 23 nt, Artificial Sequence
  Description of Artificial Sequence: Synthetic oligonucleotide
uccuagaacggccaguccaucag

SEQ ID NO: 1864 - DNA, 23 bp, Artificial Sequence
  Description of Artificial Sequence: Synthetic oligonucleotide
  Description of Combined DNA/RNA Molecule: Synthetic oligonucleotide
uggutuagcgcugccaaccuuca

SEQ ID NO: 1865 - RNA, 23 nt, Artificial Sequence
  Description of Artificial Sequence: Synthetic oligonucleotide
ucuagaacggccaguccaucagg

SEQ ID NO: 1866 - RNA, 23 nt, Artificial Sequence
  Description of Artificial Sequence: Synthetic oligonucleotide
uccaguuguccaccaucaguucu

SEQ ID NO: 1867 - DNA, 23 bp, Artificial Sequence
  Description of Artificial Sequence: Synthetic oligonucleotide
  Description of Combined DNA/RNA Molecule: Synthetic oligonucleotide
uccagutguccaccaucaguucu

SEQ ID NO: 1868 - RNA, 23 nt, Artificial Sequence
  Description of Artificial Sequence: Synthetic oligonucleotide
ucaaccagccacagcaguugugu

SEQ ID NO: 1869 - DNA, 23 bp, Artificial Sequence
  Description of Artificial Sequence: Synthetic oligonucleotide
  Description of Combined DNA/RNA Molecule: Synthetic oligonucleotide
ugccagtgcucagguccguugug

SEQ ID NO: 1870 - RNA, 23 nt, Artificial Sequence
  Description of Artificial Sequence: Synthetic oligonucleotide
uccaaccagccacagcaguugug

SEQ ID NO: 1871 - DNA, 23 bp, Artificial Sequence
  Description of Artificial Sequence: Synthetic oligonucleotide
  Description of Combined DNA/RNA Molecule: Synthetic oligonucleotide
ugccagtuguccaccaucaguuc

SEQ ID NO: 1872 - RNA, 23 nt, Artificial Sequence
  Description of Artificial Sequence: Synthetic oligonucleotide
ugcaccaaccagccacagcaguu

SEQ ID NO: 1873 - RNA, 21 nt, Artificial Sequence
  Description of Artificial Sequence: Synthetic oligonucleotide
uguuuccuaugaucaagcaaa

SEQ ID NO: 1874 - RNA, 21 nt, Artificial Sequence
  Description of Artificial Sequence: Synthetic oligonucleotide
ugacuucacuaacuucgauca

SEQ ID NO: 1875 - RNA, 21 nt, Artificial Sequence
  Description of Artificial Sequence: Synthetic oligonucleotide
caaagcuuccuucaaauaaga

SEQ ID NO: 1876 - RNA, 21 nt, Artificial Sequence
  Description of Artificial Sequence: Synthetic oligonucleotide
ucaaagcuuccuucaaauaaa

SEQ ID NO: 1877 - RNA, 21 nt, Artificial Sequence
  Description of Artificial Sequence: Synthetic oligonucleotide
gucuguauccaaauaaugaaa

SEQ ID NO: 1878 - RNA, 21 nt, Artificial Sequence
  Description of Artificial Sequence: Synthetic oligonucleotide
auuccguaaacuuaacuucaa

SEQ ID NO: 1879 - RNA, 21 nt, Artificial Sequence
  Description of Artificial Sequence: Synthetic oligonucleotide
uccuaugaucaagcaacuuca

SEQ ID NO: 1880 - RNA, 21 nt, Artificial Sequence
  Description of Artificial Sequence: Synthetic oligonucleotide
guuuccuaugaucaagcaaca

SEQ ID NO: 1881 - RNA, 21 nt, Artificial Sequence
  Description of Artificial Sequence: Synthetic oligonucleotide
augcugcuuuuaaaacauaga

SEQ ID NO: 1882 - RNA, 21 nt, Artificial Sequence
  Description of Artificial Sequence: Synthetic oligonucleotide
cauucagacaauauaucauaa

SEQ ID NO: 1883 - RNA, 21 nt, Artificial Sequence
  Description of Artificial Sequence: Synthetic oligonucleotide
gacuucacuaacuucgaucca

SEQ ID NO: 1884 - RNA, 21 nt, Artificial Sequence
  Description of Artificial Sequence: Synthetic oligonucleotide
ccauucagacaauauaucaua

SEQ ID NO: 1885 - RNA, 21 nt, Artificial Sequence
  Description of Artificial Sequence: Synthetic oligonucleotide
ucuguauccaaauaaugaaua

SEQ ID NO: 1886 - RNA, 21 nt, Artificial Sequence
  Description of Artificial Sequence: Synthetic oligonucleotide
aaucaaagcuuccuucaaaua

SEQ ID NO: 1887 - RNA, 21 nt, Artificial Sequence
  Description of Artificial Sequence: Synthetic oligonucleotide
auucagacaauauaucauaaa

SEQ ID NO: 1888 - RNA, 21 nt, Artificial Sequence
  Description of Artificial Sequence: Synthetic oligonucleotide
ccguaaacuuaacuucaauga

SEQ ID NO: 1889 - skipped

SEQ ID NO: 1890 - RNA, 21 nt, Artificial Sequence
  Description of Artificial Sequence: Synthetic oligonucleotide
gugcugacuucacuaacuuca

SEQ ID NO: 1891 - RNA, 21 nt, Artificial Sequence
  Description of Artificial Sequence: Synthetic oligonucleotide
aagcuuccuucaaauaagaua

SEQ ID NO: 1892 - RNA, 21 nt, Artificial Sequence
  Description of Artificial Sequence: Synthetic oligonucleotide
aaauuccguaaacuuaacuua

SEQ ID NO: 1893 - RNA, 21 nt, Artificial Sequence
  Description of Artificial Sequence: Synthetic oligonucleotide
cugucuguuuccuaugaucaa

SEQ ID NO: 1894 - RNA, 21 nt, Artificial Sequence
  Description of Artificial Sequence: Synthetic oligonucleotide
guauccaaauaaugaaucuua

SEQ ID NO: 1895 - RNA, 21 nt, Artificial Sequence
  Description of Artificial Sequence: Synthetic oligonucleotide
cugacuucacuaacuucgaua

SEQ ID NO: 1896 - RNA, 21 nt, Artificial Sequence
  Description of Artificial Sequence: Synthetic oligonucleotide
gcuuccuucaaauaagaugga

SEQ ID NO: 1897 - RNA, 21 nt, Artificial Sequence
  Description of Artificial Sequence: Synthetic oligonucleotide
aaaucaaagcuuccuucaaaa

SEQ ID NO: 1898 - RNA, 21 nt, Artificial Sequence
  Description of Artificial Sequence: Synthetic oligonucleotide
agcuuccuucaaauaagauga

SEQ ID NO: 1899 - RNA, 21 nt, Artificial Sequence
  Description of Artificial Sequence: Synthetic oligonucleotide
ugcugcuuuuaaaacauagga

SEQ ID NO: 1900 - RNA, 21 nt, Artificial Sequence
  Description of Artificial Sequence: Synthetic oligonucleotide
aggcaaaucaaagcuuccuua

SEQ ID NO: 1901 - RNA, 21 nt, Artificial Sequence
  Description of Artificial Sequence: Synthetic oligonucleotide
ggcaaaucaaagcuuccuuca

SEQ ID NO: 1902 - RNA, 21 nt, Artificial Sequence
  Description of Artificial Sequence: Synthetic oligonucleotide
aaagcuuccuucaaauaagaa

SEQ ID NO: 1903 - RNA, 21 nt, Artificial Sequence
  Description of Artificial Sequence: Synthetic oligonucleotide
uaaaaugcugcuuuuaaaaca

SEQ ID NO: 1904 - RNA, 21 nt, Artificial Sequence
  Description of Artificial Sequence: Synthetic oligonucleotide
aagaauaaaguaccuugacua

SEQ ID NO: 1905 - RNA, 21 nt, Artificial Sequence
  Description of Artificial Sequence: Synthetic oligonucleotide
agaauaaaguaccuugacuua

SEQ ID NO: 1906 - RNA, 21 nt, Artificial Sequence
  Description of Artificial Sequence: Synthetic oligonucleotide
gucuguuuccuaugaucaaga

SEQ ID NO: 1907 - RNA, 21 nt, Artificial Sequence
  Description of Artificial Sequence: Synthetic oligonucleotide
uccguaaacuuaacuucaaua

SEQ ID NO: 1908 - RNA, 21 nt, Artificial Sequence
  Description of Artificial Sequence: Synthetic oligonucleotide
ccucuucuggaaugugugaca

SEQ ID NO: 1909 - RNA, 21 nt, Artificial Sequence
  Description of Artificial Sequence: Synthetic oligonucleotide
uauccaaauaaugaaucuuca

SEQ ID NO: 1910 - RNA, 21 nt, Artificial Sequence
  Description of Artificial Sequence: Synthetic oligonucleotide
ucuguuuccuaugaucaagca

SEQ ID NO: 1911 - RNA, 21 nt, Artificial Sequence
  Description of Artificial Sequence: Synthetic oligonucleotide
guugacaucgacacucauaca

SEQ ID NO: 1912 - RNA, 21 nt, Artificial Sequence
  Description of Artificial Sequence: Synthetic oligonucleotide
aaguaccuugacuuuguucaa

SEQ ID NO: 1913 - RNA, 21 nt, Artificial Sequence
  Description of Artificial Sequence: Synthetic oligonucleotide
cagaucuaccuuggugauuua

SEQ ID NO: 1914 - RNA, 21 nt, Artificial Sequence
  Description of Artificial Sequence: Synthetic oligonucleotide
cuggauugugcucaaggaaca

SEQ ID NO: 1915 - RNA, 21 nt, Artificial Sequence
  Description of Artificial Sequence: Synthetic oligonucleotide
ugcuuuuaaaacauaggaaaa

SEQ ID NO: 1916 - RNA, 21 nt, Artificial Sequence
  Description of Artificial Sequence: Synthetic oligonucleotide
ugcugacuucacuaacuucga

SEQ ID NO: 1917 - RNA, 21 nt, Artificial Sequence
  Description of Artificial Sequence: Synthetic oligonucleotide
gaaauuccguaaacuuaacua

SEQ ID NO: 1918 - RNA, 21 nt, Artificial Sequence
  Description of Artificial Sequence: Synthetic oligonucleotide
uaaggcaaaucagguaaaaua

SEQ ID NO: 1919 - RNA, 21 nt, Artificial Sequence
  Description of Artificial Sequence: Synthetic oligonucleotide
guucuagguauuuuuuugaaa

SEQ ID NO: 1920 - RNA, 21 nt, Artificial Sequence
  Description of Artificial Sequence: Synthetic oligonucleotide
aagauaaauugagcuaguuaa

SEQ ID NO: 1921 - RNA, 21 nt, Artificial Sequence
  Description of Artificial Sequence: Synthetic oligonucleotide
uuagcuaagcacagaucuaca

SEQ ID NO: 1922 - RNA, 21 nt, Artificial Sequence
  Description of Artificial Sequence: Synthetic oligonucleotide
cuucacuaacuucgauccuca

SEQ ID NO: 1923 - RNA, 21 nt, Artificial Sequence
  Description of Artificial Sequence: Synthetic oligonucleotide
aauuccguaaacuuaacuuca

SEQ ID NO: 1924 - RNA, 21 nt, Artificial Sequence
  Description of Artificial Sequence: Synthetic oligonucleotide
cugcuuuuaaaacauaggaaa

SEQ ID NO: 1925 - RNA, 21 nt, Artificial Sequence
  Description of Artificial Sequence: Synthetic oligonucleotide
cuguugacaucgacacucaua

SEQ ID NO: 1926 - RNA, 21 nt, Artificial Sequence
  Description of Artificial Sequence: Synthetic oligonucleotide
uucacuaacuucgauccucga

SEQ ID NO: 1927 - RNA, 21 nt, Artificial Sequence
  Description of Artificial Sequence: Synthetic oligonucleotide
gcuaagcacagaucuaccuua

SEQ ID NO: 1928 - RNA, 21 nt, Artificial Sequence
  Description of Artificial Sequence: Synthetic oligonucleotide
uaaaguaccuugacuuuguua

SEQ ID NO: 1929 - RNA, 21 nt, Artificial Sequence
  Description of Artificial Sequence: Synthetic oligonucleotide
aaaaugcugcuuuuaaaacaa

SEQ ID NO: 1930 - RNA, 21 nt, Artificial Sequence
  Description of Artificial Sequence: Synthetic oligonucleotide
gcugcuuuuaaaacauaggaa

SEQ ID NO: 1931 - RNA, 21 nt, Artificial Sequence
  Description of Artificial Sequence: Synthetic oligonucleotide
ucaugauucuauguaauguaa

SEQ ID NO: 1932 - RNA, 21 nt, Artificial Sequence
  Description of Artificial Sequence: Synthetic oligonucleotide
agugcugacuucacuaacuua

SEQ ID NO: 1933 - RNA, 21 nt, Artificial Sequence
  Description of Artificial Sequence: Synthetic oligonucleotide
cuaagcacagaucuaccuuga

SEQ ID NO: 1934 - RNA, 21 nt, Artificial Sequence
  Description of Artificial Sequence: Synthetic oligonucleotide
cacuaacuucgauccucguga

SEQ ID NO: 1935 - RNA, 21 nt, Artificial Sequence
  Description of Artificial Sequence: Synthetic oligonucleotide
cugaagaacaggcaaaucaaa

SEQ ID NO: 1936 - RNA, 21 nt, Artificial Sequence
  Description of Artificial Sequence: Synthetic oligonucleotide
aaaguaccuugacuuuguuca

SEQ ID NO: 1937 - RNA, 21 nt, Artificial Sequence
  Description of Artificial Sequence: Synthetic oligonucleotide
gcuuuguuuaugguaguagua

SEQ ID NO: 1938 - RNA, 21 nt, Artificial Sequence
  Description of Artificial Sequence: Synthetic oligonucleotide
caugauucuauguaauguaaa

SEQ ID NO: 1939 - RNA, 21 nt, Artificial Sequence
  Description of Artificial Sequence: Synthetic oligonucleotide
cguucuagguauuuuuuugaa

SEQ ID NO: 1940 - RNA, 21 nt, Artificial Sequence
  Description of Artificial Sequence: Synthetic oligonucleotide
uucuagguauuuuuuugaaga

SEQ ID NO: 1941 - RNA, 21 nt, Artificial Sequence
  Description of Artificial Sequence: Synthetic oligonucleotide
uccuuccugaauccuuggaua

SEQ ID NO: 1942 - RNA, 21 nt, Artificial Sequence
  Description of Artificial Sequence: Synthetic oligonucleotide
gacuaaaaugcugcuuuuaaa

SEQ ID NO: 1943 - RNA, 21 nt, Artificial Sequence
  Description of Artificial Sequence: Synthetic oligonucleotide
aacaggcaaaucaaagcuuca

SEQ ID NO: 1944 - RNA, 21 nt, Artificial Sequence
  Description of Artificial Sequence: Synthetic oligonucleotide
ccuuccugaauccuuggauua

SEQ ID NO: 1945 - RNA, 21 nt, Artificial Sequence
  Description of Artificial Sequence: Synthetic oligonucleotide
ugaugacucucaggacaaaga

SEQ ID NO: 1946 - RNA, 21 nt, Artificial Sequence
  Description of Artificial Sequence: Synthetic oligonucleotide
uggaguuugaugacucucaga

SEQ ID NO: 1947 - RNA, 21 nt, Artificial Sequence
  Description of Artificial Sequence: Synthetic oligonucleotide
auccaaauaaugaaucuucga

SEQ ID NO: 1948 - RNA, 21 nt, Artificial Sequence
  Description of Artificial Sequence: Synthetic oligonucleotide
uugacuuuguucacagcauga

SEQ ID NO: 1949 - RNA, 21 nt, Artificial Sequence
  Description of Artificial Sequence: Synthetic oligonucleotide
agaucuaccuuggugauuuga

SEQ ID NO: 1950 - RNA, 21 nt, Artificial Sequence
  Description of Artificial Sequence: Synthetic oligonucleotide
augguaguaguuuuucuguaa

SEQ ID NO: 1951 - RNA, 21 nt, Artificial Sequence
  Description of Artificial Sequence: Synthetic oligonucleotide
ccuugacuuuguucacagcaa

SEQ ID NO: 1952 - RNA, 21 nt, Artificial Sequence
  Description of Artificial Sequence: Synthetic oligonucleotide
ccuggauugugcucaaggaaa

SEQ ID NO: 1953 - RNA, 21 nt, Artificial Sequence
  Description of Artificial Sequence: Synthetic oligonucleotide
gagcuaguuaaggcaaaucaa

SEQ ID NO: 1954 - RNA, 21 nt, Artificial Sequence
  Description of Artificial Sequence: Synthetic oligonucleotide
acugaagaacaggcaaaucaa

SEQ ID NO: 1955 - RNA, 21 nt, Artificial Sequence
  Description of Artificial Sequence: Synthetic oligonucleotide
ugaagaacaggcaaaucaaaa

SEQ ID NO: 1956 - RNA, 21 nt, Artificial Sequence
  Description of Artificial Sequence: Synthetic oligonucleotide
cuccucuucuggaauguguga

SEQ ID NO: 1957 - RNA, 21 nt, Artificial Sequence
  Description of Artificial Sequence: Synthetic oligonucleotide
gcuuucaacguggaguuugaa

SEQ ID NO: 1958 - RNA, 21 nt, Artificial Sequence
  Description of Artificial Sequence: Synthetic oligonucleotide
ugcuuucaacguggaguuuga

SEQ ID NO: 1959 - RNA, 21 nt, Artificial Sequence
  Description of Artificial Sequence: Synthetic oligonucleotide
cagguaaaauagucaugauua

SEQ ID NO: 1960 - RNA, 21 nt, Artificial Sequence
  Description of Artificial Sequence: Synthetic oligonucleotide
cuguauccaaauaaugaauca

SEQ ID NO: 1961 - RNA, 21 nt, Artificial Sequence
  Description of Artificial Sequence: Synthetic oligonucleotide
aaggcaaaucagguaaaauaa

SEQ ID NO: 1962 - RNA, 21 nt, Artificial Sequence
  Description of Artificial Sequence: Synthetic oligonucleotide
ccuccuuccugaauccuugga

SEQ ID NO: 1963 - RNA, 21 nt, Artificial Sequence
  Description of Artificial Sequence: Synthetic oligonucleotide
uuccuucaaauaagaugguca

SEQ ID NO: 1964 - RNA, 21 nt, Artificial Sequence
  Description of Artificial Sequence: Synthetic oligonucleotide
uugaaauuccguaaacuuaaa

SEQ ID NO: 1965 - RNA, 21 nt, Artificial Sequence
  Description of Artificial Sequence: Synthetic oligonucleotide
acacucauacagccaaguaua

SEQ ID NO: 1966 - RNA, 21 nt, Artificial Sequence
  Description of Artificial Sequence: Synthetic oligonucleotide
gcacagaucuaccuuggugaa

SEQ ID NO: 1967 - RNA, 21 nt, Artificial Sequence
  Description of Artificial Sequence: Synthetic oligonucleotide
cuuucaacguggaguuugaua

SEQ ID NO: 1968 - RNA, 21 nt, Artificial Sequence
  Description of Artificial Sequence: Synthetic oligonucleotide
uagcuaagcacagaucuacca

SEQ ID NO: 1969 - RNA, 21 nt, Artificial Sequence
  Description of Artificial Sequence: Synthetic oligonucleotide
uugugauacagaguauauuua

SEQ ID NO: 1970 - RNA, 21 nt, Artificial Sequence
  Description of Artificial Sequence: Synthetic oligonucleotide
acucauacagccaaguaugaa

SEQ ID NO: 1971 - RNA, 21 nt, Artificial Sequence
  Description of Artificial Sequence: Synthetic oligonucleotide
aguuaaggcaaaucagguaaa

SEQ ID NO: 1972 - RNA, 21 nt, Artificial Sequence
  Description of Artificial Sequence: Synthetic oligonucleotide
guugugauacagaguauauua

SEQ ID NO: 1973 - RNA, 21 nt, Artificial Sequence
  Description of Artificial Sequence: Synthetic oligonucleotide
ugacaucgacacucauacaga

SEQ ID NO: 1974 - RNA, 21 nt, Artificial Sequence
  Description of Artificial Sequence: Synthetic oligonucleotide
agauaaauugagcuaguuaaa

SEQ ID NO: 1975 - RNA, 21 nt, Artificial Sequence
  Description of Artificial Sequence: Synthetic oligonucleotide
uagguauuuuuuugaagguua

SEQ ID NO: 1976 - RNA, 21 nt, Artificial Sequence
  Description of Artificial Sequence: Synthetic oligonucleotide
uggugcuuuguuuaugguaga

SEQ ID NO: 1977 - RNA, 21 nt, Artificial Sequence
  Description of Artificial Sequence: Synthetic oligonucleotide
ugugauacagaguauauuuca

SEQ ID NO: 1978 - RNA, 21 nt, Artificial Sequence
  Description of Artificial Sequence: Synthetic oligonucleotide
ucuucuggaaugugugaccua

SEQ ID NO: 1979 - RNA, 21 nt, Artificial Sequence
  Description of Artificial Sequence: Synthetic oligonucleotide
cuggccguucuagguauuuua

SEQ ID NO: 1980 - RNA, 21 nt, Artificial Sequence
  Description of Artificial Sequence: Synthetic oligonucleotide
aucagguaaaauagucaugaa

SEQ ID NO: 1981 - RNA, 21 nt, Artificial Sequence
  Description of Artificial Sequence: Synthetic oligonucleotide
uuccauuaaaacaaagggcaa

SEQ ID NO: 1982 - RNA, 21 nt, Artificial Sequence
  Description of Artificial Sequence: Synthetic oligonucleotide
caagagugcugacuucacuaa

SEQ ID NO: 1983 - RNA, 21 nt, Artificial Sequence
  Description of Artificial Sequence: Synthetic oligonucleotide
uuucaacguggaguuugauga

SEQ ID NO: 1984 - RNA, 21 nt, Artificial Sequence
  Description of Artificial Sequence: Synthetic oligonucleotide
uuggugcuuuguuuaugguaa

SEQ ID NO: 1985 - RNA, 21 nt, Artificial Sequence
  Description of Artificial Sequence: Synthetic oligonucleotide
cacucauacagccaaguauga

SEQ ID NO: 1986 - RNA, 21 nt, Artificial Sequence
  Description of Artificial Sequence: Synthetic oligonucleotide
auaaaguaccuugacuuugua

SEQ ID NO: 1987 - RNA, 21 nt, Artificial Sequence
  Description of Artificial Sequence: Synthetic oligonucleotide
augacuuuugaauuacagaga

SEQ ID NO: 1988 - RNA, 21 nt, Artificial Sequence
  Description of Artificial Sequence: Synthetic oligonucleotide
gucaugauucuauguaaugua

SEQ ID NO: 1989 - RNA, 21 nt, Artificial Sequence
  Description of Artificial Sequence: Synthetic oligonucleotide
gaccuggauugugcucaagga

SEQ ID NO: 1990 - RNA, 21 nt, Artificial Sequence
  Description of Artificial Sequence: Synthetic oligonucleotide
gacaucgacacucauacagca

SEQ ID NO: 1991 - RNA, 21 nt, Artificial Sequence
  Description of Artificial Sequence: Synthetic oligonucleotide
gaagaacaggcaaaucaaaga

SEQ ID NO: 1992 - RNA, 21 nt, Artificial Sequence
  Description of Artificial Sequence: Synthetic oligonucleotide
cguaaacuuaacuucaaugga

SEQ ID NO: 1993 - RNA, 21 nt, Artificial Sequence
  Description of Artificial Sequence: Synthetic oligonucleotide
agguaaaauagucaugauuca

SEQ ID NO: 1994 - RNA, 21 nt, Artificial Sequence
  Description of Artificial Sequence: Synthetic oligonucleotide
guaccuugacuuuguucacaa

SEQ ID NO: 1995 - RNA, 21 nt, Artificial Sequence
  Description of Artificial Sequence: Synthetic oligonucleotide
ccguucuagguauuuuuuuga

SEQ ID NO: 1996 - RNA, 21 nt, Artificial Sequence
  Description of Artificial Sequence: Synthetic oligonucleotide
uuuaugguaguaguuuuucua

SEQ ID NO: 1997 - RNA, 21 nt, Artificial Sequence
  Description of Artificial Sequence: Synthetic oligonucleotide
cguggaguuugaugacucuca

SEQ ID NO: 1998 - RNA, 21 nt, Artificial Sequence
  Description of Artificial Sequence: Synthetic oligonucleotide
uucaacguggaguuugaugaa

SEQ ID NO: 1999 - RNA, 21 nt, Artificial Sequence
  Description of Artificial Sequence: Synthetic oligonucleotide
gaguugugauacagaguauaa

SEQ ID NO: 2000 - RNA, 21 nt, Artificial Sequence
  Description of Artificial Sequence: Synthetic oligonucleotide
uaccuugacuuuguucacaga

SEQ ID NO: 2001 - RNA, 21 nt, Artificial Sequence
  Description of Artificial Sequence: Synthetic oligonucleotide
uagaguugugauacagaguaa

SEQ ID NO: 2002 - RNA, 21 nt, Artificial Sequence
  Description of Artificial Sequence: Synthetic oligonucleotide
ugagugcaaauccauagcaca

SEQ ID NO: 2003 - RNA, 21 nt, Artificial Sequence
  Description of Artificial Sequence: Synthetic oligonucleotide
caaaucagguaaaauagucaa

SEQ ID NO: 2004 - RNA, 21 nt, Artificial Sequence
  Description of Artificial Sequence: Synthetic oligonucleotide
aagcacagaucuaccuuggua

SEQ ID NO: 2005 - RNA, 21 nt, Artificial Sequence
  Description of Artificial Sequence: Synthetic oligonucleotide
acuuuguucacagcauguaga

SEQ ID NO: 2006 - RNA, 21 nt, Artificial Sequence
  Description of Artificial Sequence: Synthetic oligonucleotide
uggccguucuagguauuuuua

SEQ ID NO: 2007 - RNA, 21 nt, Artificial Sequence
  Description of Artificial Sequence: Synthetic oligonucleotide
gccaaguaugacccuucccua

SEQ ID NO: 2008 - RNA, 21 nt, Artificial Sequence
  Description of Artificial Sequence: Synthetic oligonucleotide
uaugguaguaguuuuucugua

SEQ ID NO: 2009 - RNA, 21 nt, Artificial Sequence
  Description of Artificial Sequence: Synthetic oligonucleotide
aauugagcuaguuaaggcaaa

SEQ ID NO: 2010 - RNA, 21 nt, Artificial Sequence
  Description of Artificial Sequence: Synthetic oligonucleotide
acuaaaaugcugcuuuuaaaa

SEQ ID NO: 2011 - RNA, 21 nt, Artificial Sequence
  Description of Artificial Sequence: Synthetic oligonucleotide
acuucacuugguucacuggaa

SEQ ID NO: 2012 - RNA, 21 nt, Artificial Sequence
  Description of Artificial Sequence: Synthetic oligonucleotide
ucuagguauuuuuuugaagga

SEQ ID NO: 2013 - RNA, 21 nt, Artificial Sequence
  Description of Artificial Sequence: Synthetic oligonucleotide
agcacagaucuaccuugguga

SEQ ID NO: 2014 - RNA, 21 nt, Artificial Sequence
  Description of Artificial Sequence: Synthetic oligonucleotide
gccguucuagguauuuuuuua

SEQ ID NO: 2015 - RNA, 21 nt, Artificial Sequence
  Description of Artificial Sequence: Synthetic oligonucleotide
cuaaaaugcugcuuuuaaaaa

SEQ ID NO: 2016 - RNA, 21 nt, Artificial Sequence
  Description of Artificial Sequence: Synthetic oligonucleotide
gaacaggcaaaucaaagcuua

SEQ ID NO: 2017 - RNA, 21 nt, Artificial Sequence
  Description of Artificial Sequence: Synthetic oligonucleotide
ugcuuuguuuaugguaguaga

SEQ ID NO: 2018 - RNA, 21 nt, Artificial Sequence
  Description of Artificial Sequence: Synthetic oligonucleotide
aauuagaguugugauacagaa

SEQ ID NO: 2019 - RNA, 21 nt, Artificial Sequence
  Description of Artificial Sequence: Synthetic oligonucleotide
cugguuggugcuuuguuuaua

SEQ ID NO: 2020 - RNA, 21 nt, Artificial Sequence
  Description of Artificial Sequence: Synthetic oligonucleotide
uccuucaaauaagauggucca

SEQ ID NO: 2021 - RNA, 21 nt, Artificial Sequence
  Description of Artificial Sequence: Synthetic oligonucleotide
gccuccuuccugaauccuuga

SEQ ID NO: 2022 - RNA, 21 nt, Artificial Sequence
  Description of Artificial Sequence: Synthetic oligonucleotide
gauucuauguaauguaaacca

SEQ ID NO: 2023 - RNA, 21 nt, Artificial Sequence
  Description of Artificial Sequence: Synthetic oligonucleotide
ugguuggugcuuuguuuauga

SEQ ID NO: 2024 - RNA, 21 nt, Artificial Sequence
  Description of Artificial Sequence: Synthetic oligonucleotide
cucauacagccaaguaugaca

SEQ ID NO: 2025 - RNA, 21 nt, Artificial Sequence
  Description of Artificial Sequence: Synthetic oligonucleotide
aucgacacucauacagccaaa

SEQ ID NO: 2026 - RNA, 21 nt, Artificial Sequence
  Description of Artificial Sequence: Synthetic oligonucleotide
gcacuggcauaaggacuucca

SEQ ID NO: 2027 - RNA, 21 nt, Artificial Sequence
  Description of Artificial Sequence: Synthetic oligonucleotide
aacguggaguuugaugacuca

SEQ ID NO: 2028 - RNA, 21 nt, Artificial Sequence
  Description of Artificial Sequence: Synthetic oligonucleotide
gcaaaucagguaaaauaguca

SEQ ID NO: 2029 - RNA, 21 nt, Artificial Sequence
  Description of Artificial Sequence: Synthetic oligonucleotide
cuucagaaaguuguugaugua

SEQ ID NO: 2030 - RNA, 21 nt, Artificial Sequence
  Description of Artificial Sequence: Synthetic oligonucleotide
aaaucagguaaaauagucaua

SEQ ID NO: 2031 - RNA, 21 nt, Artificial Sequence
  Description of Artificial Sequence: Synthetic oligonucleotide
aggcaaaucagguaaaauaga

SEQ ID NO: 2032 - RNA, 21 nt, Artificial Sequence
  Description of Artificial Sequence: Synthetic oligonucleotide
gggcaagagugcugacuucaa

SEQ ID NO: 2033 - RNA, 21 nt, Artificial Sequence
  Description of Artificial Sequence: Synthetic oligonucleotide
ggccguucuagguauuuuuua

SEQ ID NO: 2034 - RNA, 21 nt, Artificial Sequence
  Description of Artificial Sequence: Synthetic oligonucleotide
cgggccuucagaaaguuguua

SEQ ID NO: 2035 - RNA, 21 nt, Artificial Sequence
  Description of Artificial Sequence: Synthetic oligonucleotide
ggcaaaucagguaaaauagua

SEQ ID NO: 2036 - RNA, 21 nt, Artificial Sequence
  Description of Artificial Sequence: Synthetic oligonucleotide
gaggauccucaacaaugguca

SEQ ID NO: 2037 - RNA, 21 nt, Artificial Sequence
  Description of Artificial Sequence: Synthetic oligonucleotide
uucacuugguucacuggaaca

SEQ ID NO: 2038 - RNA, 21 nt, Artificial Sequence
  Description of Artificial Sequence: Synthetic oligonucleotide
agaacugaugguggacaacua

SEQ ID NO: 2039 - RNA, 21 nt, Artificial Sequence
  Description of Artificial Sequence: Synthetic oligonucleotide
aauaaaguaccuugacuuuga

SEQ ID NO: 2040 - RNA, 21 nt, Artificial Sequence
  Description of Artificial Sequence: Synthetic oligonucleotide
cuuuguucacagcauguagga

SEQ ID NO: 2041 - RNA, 21 nt, Artificial Sequence
  Description of Artificial Sequence: Synthetic oligonucleotide
aauaagaauaaaguaccuuga

SEQ ID NO: 2042 - RNA, 21 nt, Artificial Sequence
  Description of Artificial Sequence: Synthetic oligonucleotide
aguaguuuuucuguaacacaa

SEQ ID NO: 2043 - RNA, 21 nt, Artificial Sequence
  Description of Artificial Sequence: Synthetic oligonucleotide
ccaaguaugacccuucccuga

SEQ ID NO: 2044 - RNA, 21 nt, Artificial Sequence
  Description of Artificial Sequence: Synthetic oligonucleotide
uugagugcaaauccauagcaa

SEQ ID NO: 2045 - RNA, 21 nt, Artificial Sequence
  Description of Artificial Sequence: Synthetic oligonucleotide
ggccuucagaaaguuguugaa

SEQ ID NO: 2046 - RNA, 21 nt, Artificial Sequence
  Description of Artificial Sequence: Synthetic oligonucleotide
aggauccucaacaauggucaa

SEQ ID NO: 2047 - RNA, 21 nt, Artificial Sequence
  Description of Artificial Sequence: Synthetic oligonucleotide
auuagaguugugauacagaga

SEQ ID NO: 2048 - RNA, 21 nt, Artificial Sequence
  Description of Artificial Sequence: Synthetic oligonucleotide
caacguggaguuugaugacua

SEQ ID NO: 2049 - RNA, 21 nt, Artificial Sequence
  Description of Artificial Sequence: Synthetic oligonucleotide
gacuuuugaauuacagagaua

SEQ ID NO: 2050 - RNA, 21 nt, Artificial Sequence
  Description of Artificial Sequence: Synthetic oligonucleotide
ugaggauccucaacaauggua

SEQ ID NO: 2051 - RNA, 21 nt, Artificial Sequence
  Description of Artificial Sequence: Synthetic oligonucleotide
gaguuugaugacucucaggaa

SEQ ID NO: 2052 - RNA, 21 nt, Artificial Sequence
  Description of Artificial Sequence: Synthetic oligonucleotide
uuuuaaaacauaggaaaguaa

SEQ ID NO: 2053 - RNA, 21 nt, Artificial Sequence
  Description of Artificial Sequence: Synthetic oligonucleotide
uuaugguaguaguuuuucuga

SEQ ID NO: 2054 - RNA, 21 nt, Artificial Sequence
  Description of Artificial Sequence: Synthetic oligonucleotide
aacuucacuugguucacugga

SEQ ID NO: 2055 - RNA, 21 nt, Artificial Sequence
  Description of Artificial Sequence: Synthetic oligonucleotide
aaauugagcuaguuaaggcaa

SEQ ID NO: 2056 - RNA, 21 nt, Artificial Sequence
  Description of Artificial Sequence: Synthetic oligonucleotide
uuuguuuaugguaguaguuua

SEQ ID NO: 2057 - RNA, 21 nt, Artificial Sequence
  Description of Artificial Sequence: Synthetic oligonucleotide
aagggcaagagugcugacuua

SEQ ID NO: 2058 - RNA, 21 nt, Artificial Sequence
  Description of Artificial Sequence: Synthetic oligonucleotide
ggaguuugaugacucucagga

SEQ ID NO: 2059 - RNA, 21 nt, Artificial Sequence
  Description of Artificial Sequence: Synthetic oligonucleotide
gggccuucagaaaguuguuga

SEQ ID NO: 2060 - RNA, 21 nt, Artificial Sequence
  Description of Artificial Sequence: Synthetic oligonucleotide
gcaagagugcugacuucacua

SEQ ID NO: 2061 - RNA, 21 nt, Artificial Sequence
  Description of Artificial Sequence: Synthetic oligonucleotide
agccacugaagaacaggcaaa

SEQ ID NO: 2062 - RNA, 21 nt, Artificial Sequence
  Description of Artificial Sequence: Synthetic oligonucleotide
auuccauuaaaacaaagggca

SEQ ID NO: 2063 - RNA, 21 nt, Artificial Sequence
  Description of Artificial Sequence: Synthetic oligonucleotide
guaguuuuucuguaacacaga

SEQ ID NO: 2064 - RNA, 21 nt, Artificial Sequence
  Description of Artificial Sequence: Synthetic oligonucleotide
gguauuuuuuugaagguugga

SEQ ID NO: 2065 - RNA, 21 nt, Artificial Sequence
  Description of Artificial Sequence: Synthetic oligonucleotide
uccaaauaaugaaucuucgga

SEQ ID NO: 2066 - RNA, 21 nt, Artificial Sequence
  Description of Artificial Sequence: Synthetic oligonucleotide
aaacauaggaaaguagaauga

SEQ ID NO: 2067 - RNA, 21 nt, Artificial Sequence
  Description of Artificial Sequence: Synthetic oligonucleotide
augacucucaggacaaagcaa

SEQ ID NO: 2068 - RNA, 21 nt, Artificial Sequence
  Description of Artificial Sequence: Synthetic oligonucleotide
agcuaguuaaggcaaaucaga

SEQ ID NO: 2069 - RNA, 21 nt, Artificial Sequence
  Description of Artificial Sequence: Synthetic oligonucleotide
ccugaggauccucaacaauga

SEQ ID NO: 2070 - RNA, 21 nt, Artificial Sequence
  Description of Artificial Sequence: Synthetic oligonucleotide
gguuggugcuuuguuuaugga

SEQ ID NO: 2071 - RNA, 21 nt, Artificial Sequence
  Description of Artificial Sequence: Synthetic oligonucleotide
agguauuuuuuugaagguuga

SEQ ID NO: 2072 - RNA, 21 nt, Artificial Sequence
  Description of Artificial Sequence: Synthetic oligonucleotide
ugaaucuucggguguuuccca

SEQ ID NO: 2073 - RNA, 21 nt, Artificial Sequence
  Description of Artificial Sequence: Synthetic oligonucleotide
uaguaguuuuucuguaacaca

SEQ ID NO: 2074 - RNA, 21 nt, Artificial Sequence
  Description of Artificial Sequence: Synthetic oligonucleotide
guuugaugacucucaggacaa

SEQ ID NO: 2075 - RNA, 21 nt, Artificial Sequence
  Description of Artificial Sequence: Synthetic oligonucleotide
aaugaaucuucggguguuuca

SEQ ID NO: 2076 - RNA, 21 nt, Artificial Sequence
  Description of Artificial Sequence: Synthetic oligonucleotide
caaauaaugaaucuucgggua

SEQ ID NO: 2077 - RNA, 21 nt, Artificial Sequence
  Description of Artificial Sequence: Synthetic oligonucleotide
uuuguucacagcauguaggga

SEQ ID NO: 2078 - RNA, 21 nt, Artificial Sequence
  Description of Artificial Sequence: Synthetic oligonucleotide
auugugcucaaggaacccaua

SEQ ID NO: 2079 - RNA, 21 nt, Artificial Sequence
  Description of Artificial Sequence: Synthetic oligonucleotide
guuggugcuuuguuuauggua

SEQ ID NO: 2080 - RNA, 21 nt, Artificial Sequence
  Description of Artificial Sequence: Synthetic oligonucleotide
gaaucuucggguguuucccua

SEQ ID NO: 2081 - RNA, 21 nt, Artificial Sequence
  Description of Artificial Sequence: Synthetic oligonucleotide
gguaguaguuuuucuguaaca

SEQ ID NO: 2082 - RNA, 21 nt, Artificial Sequence
  Description of Artificial Sequence: Synthetic oligonucleotide
agaacaggcaaaucaaagcua

SEQ ID NO: 2083 - RNA, 21 nt, Artificial Sequence
  Description of Artificial Sequence: Synthetic oligonucleotide
aaaauagucaugauucuauga

SEQ ID NO: 2084 - RNA, 21 nt, Artificial Sequence
  Description of Artificial Sequence: Synthetic oligonucleotide
acuggccguucuagguauuua

SEQ ID NO: 2085 - RNA, 21 nt, Artificial Sequence
  Description of Artificial Sequence: Synthetic oligonucleotide
cccugaggauccucaacaaua

SEQ ID NO: 2086 - RNA, 21 nt, Artificial Sequence
  Description of Artificial Sequence: Synthetic oligonucleotide
gcugguuggugcuuuguuuaa

SEQ ID NO: 2087 - RNA, 21 nt, Artificial Sequence
  Description of Artificial Sequence: Synthetic oligonucleotide
cagaaaguuguugaugugcua

SEQ ID NO: 2088 - RNA, 21 nt, Artificial Sequence
  Description of Artificial Sequence: Synthetic oligonucleotide
acuaacuucgauccucgugga

SEQ ID NO: 2089 - RNA, 21 nt, Artificial Sequence
  Description of Artificial Sequence: Synthetic oligonucleotide
ccuucagaaaguuguugauga

SEQ ID NO: 2090 - RNA, 21 nt, Artificial Sequence
  Description of Artificial Sequence: Synthetic oligonucleotide
ugagcacuggcauaaggacua

SEQ ID NO: 2091 - RNA, 21 nt, Artificial Sequence
  Description of Artificial Sequence: Synthetic oligonucleotide
cuaguuaaggcaaaucaggua

SEQ ID NO: 2092 - RNA, 21 nt, Artificial Sequence
  Description of Artificial Sequence: Synthetic oligonucleotide
cugaggauccucaacaaugga

SEQ ID NO: 2093 - RNA, 21 nt, Artificial Sequence
  Description of Artificial Sequence: Synthetic oligonucleotide
guuuaugguaguaguuuuuca

SEQ ID NO: 2094 - RNA, 21 nt, Artificial Sequence
  Description of Artificial Sequence: Synthetic oligonucleotide
ugugaccuggauugugcucaa

SEQ ID NO: 2095 - RNA, 21 nt, Artificial Sequence
  Description of Artificial Sequence: Synthetic oligonucleotide
acaucgacacucauacagcca

SEQ ID NO: 2096 - RNA, 21 nt, Artificial Sequence
  Description of Artificial Sequence: Synthetic oligonucleotide
gauugugcucaaggaacccaa

SEQ ID NO: 2097 - RNA, 21 nt, Artificial Sequence
  Description of Artificial Sequence: Synthetic oligonucleotide
ucauacagccaaguaugacca

SEQ ID NO: 2098 - RNA, 21 nt, Artificial Sequence
  Description of Artificial Sequence: Synthetic oligonucleotide
uaaaauagucaugauucuaua

SEQ ID NO: 2099 - RNA, 21 nt, Artificial Sequence
  Description of Artificial Sequence: Synthetic oligonucleotide
gugcucaaggaacccaucaga

SEQ ID NO: 2100 - RNA, 21 nt, Artificial Sequence
  Description of Artificial Sequence: Synthetic oligonucleotide
cgaagaacugaugguggacaa

SEQ ID NO: 2101 - RNA, 21 nt, Artificial Sequence
  Description of Artificial Sequence: Synthetic oligonucleotide
aauaaaaugugaagacuagaa

SEQ ID NO: 2102 - RNA, 21 nt, Artificial Sequence
  Description of Artificial Sequence: Synthetic oligonucleotide
ggcugguuggugcuuuguuua

SEQ ID NO: 2103 - RNA, 21 nt, Artificial Sequence
  Description of Artificial Sequence: Synthetic oligonucleotide
uuguucacagcauguagggua

SEQ ID NO: 2104 - RNA, 21 nt, Artificial Sequence
  Description of Artificial Sequence: Synthetic oligonucleotide
uucaaauaagauggucccaua

SEQ ID NO: 2105 - RNA, 21 nt, Artificial Sequence
  Description of Artificial Sequence: Synthetic oligonucleotide
uuuaaaacauaggaaaguaga

SEQ ID NO: 2106 - RNA, 21 nt, Artificial Sequence
  Description of Artificial Sequence: Synthetic oligonucleotide
uuguuuaugguaguaguuuua

SEQ ID NO: 2107 - RNA, 21 nt, Artificial Sequence
  Description of Artificial Sequence: Synthetic oligonucleotide
gcuaguuaaggcaaaucagga

SEQ ID NO: 2108 - RNA, 21 nt, Artificial Sequence
  Description of Artificial Sequence: Synthetic oligonucleotide
guaaaauagucaugauucuaa

SEQ ID NO: 2109 - RNA, 21 nt, Artificial Sequence
  Description of Artificial Sequence: Synthetic oligonucleotide
gacuggccguucuagguauua

SEQ ID NO: 2110 - RNA, 21 nt, Artificial Sequence
  Description of Artificial Sequence: Synthetic oligonucleotide
ucagccacugaagaacaggca

SEQ ID NO: 2111 - RNA, 21 nt, Artificial Sequence
  Description of Artificial Sequence: Synthetic oligonucleotide
uggaaugugugaccuggauua

SEQ ID NO: 2112 - RNA, 21 nt, Artificial Sequence
  Description of Artificial Sequence: Synthetic oligonucleotide
ucacagcauguagggugauga

SEQ ID NO: 2113 - RNA, 21 nt, Artificial Sequence
  Description of Artificial Sequence: Synthetic oligonucleotide
uacagccaaguaugacccuua

SEQ ID NO: 2114 - RNA, 21 nt, Artificial Sequence
  Description of Artificial Sequence: Synthetic oligonucleotide
cugagcacuggcauaaggaca

SEQ ID NO: 2115 - RNA, 21 nt, Artificial Sequence
  Description of Artificial Sequence: Synthetic oligonucleotide
gcucaaggaacccaucagcga

SEQ ID NO: 2116 - RNA, 21 nt, Artificial Sequence
  Description of Artificial Sequence: Synthetic oligonucleotide
uucuggaaugugugaccugga

SEQ ID NO: 2117 - RNA, 21 nt, Artificial Sequence
  Description of Artificial Sequence: Synthetic oligonucleotide
uaaauugagcuaguuaaggca

SEQ ID NO: 2118 - RNA, 21 nt, Artificial Sequence
  Description of Artificial Sequence: Synthetic oligonucleotide
uauuuuuuugaagguuggcaa

SEQ ID NO: 2119 - RNA, 21 nt, Artificial Sequence
  Description of Artificial Sequence: Synthetic oligonucleotide
uaauuagaguugugauacaga

SEQ ID NO: 2120 - RNA, 21 nt, Artificial Sequence
  Description of Artificial Sequence: Synthetic oligonucleotide
ugacucucaggacaaagcaga

SEQ ID NO: 2121 - RNA, 21 nt, Artificial Sequence
  Description of Artificial Sequence: Synthetic oligonucleotide
cauacagccaaguaugaccca

SEQ ID NO: 2122 - RNA, 21 nt, Artificial Sequence
  Description of Artificial Sequence: Synthetic oligonucleotide
guauuuuuuugaagguuggca

SEQ ID NO: 2123 - RNA, 21 nt, Artificial Sequence
  Description of Artificial Sequence: Synthetic oligonucleotide
cacagcauguagggugaugaa

SEQ ID NO: 2124 - RNA, 21 nt, Artificial Sequence
  Description of Artificial Sequence: Synthetic oligonucleotide
uauaauuagaguugugauaca

SEQ ID NO: 2125 - RNA, 21 nt, Artificial Sequence
  Description of Artificial Sequence: Synthetic oligonucleotide
gauuuugggaaagcugugcaa

SEQ ID NO: 2126 - RNA, 21 nt, Artificial Sequence
  Description of Artificial Sequence: Synthetic oligonucleotide
uaaaacaaagggcaagaguga

SEQ ID NO: 2127 - RNA, 21 nt, Artificial Sequence
  Description of Artificial Sequence: Synthetic oligonucleotide
ucaaggaacccaucagcguca

SEQ ID NO: 2128 - RNA, 21 nt, Artificial Sequence
  Description of Artificial Sequence: Synthetic oligonucleotide
ucagaaaguuguugaugugca

SEQ ID NO: 2129 - RNA, 21 nt, Artificial Sequence
  Description of Artificial Sequence: Synthetic oligonucleotide
ccaaauaaugaaucuucggga

SEQ ID NO: 2130 - RNA, 21 nt, Artificial Sequence
  Description of Artificial Sequence: Synthetic oligonucleotide
agcauguagggugaugagcaa

SEQ ID NO: 2131 - RNA, 21 nt, Artificial Sequence
  Description of Artificial Sequence: Synthetic oligonucleotide
gauaaauugagcuaguuaaga

SEQ ID NO: 2132 - RNA, 21 nt, Artificial Sequence
  Description of Artificial Sequence: Synthetic oligonucleotide
cucagccacugaagaacagga

SEQ ID NO: 2133 - RNA, 21 nt, Artificial Sequence
  Description of Artificial Sequence: Synthetic oligonucleotide
cagcauguagggugaugagca

SEQ ID NO: 2134 - RNA, 21 nt, Artificial Sequence
  Description of Artificial Sequence: Synthetic oligonucleotide
auaaugaaucuucggguguua

SEQ ID NO: 2135 - RNA, 21 nt, Artificial Sequence
  Description of Artificial Sequence: Synthetic oligonucleotide
ggaacccaucagcgucagcaa

SEQ ID NO: 2136 - RNA, 21 nt, Artificial Sequence
  Description of Artificial Sequence: Synthetic oligonucleotide
uguucacagcauguaggguga

SEQ ID NO: 2137 - RNA, 21 nt, Artificial Sequence
  Description of Artificial Sequence: Synthetic oligonucleotide
aaacaaagggcaagagugcua

SEQ ID NO: 2138 - RNA, 21 nt, Artificial Sequence
  Description of Artificial Sequence: Synthetic oligonucleotide
ugugugaccuggauugugcua

SEQ ID NO: 2139 - RNA, 21 nt, Artificial Sequence
  Description of Artificial Sequence: Synthetic oligonucleotide
aauaaugaaucuucgggugua

SEQ ID NO: 2140 - RNA, 21 nt, Artificial Sequence
  Description of Artificial Sequence: Synthetic oligonucleotide
auuuuuuugaagguuggcaga

SEQ ID NO: 2141 - RNA, 21 nt, Artificial Sequence
  Description of Artificial Sequence: Synthetic oligonucleotide
ugcucaaggaacccaucagca

SEQ ID NO: 2142 - RNA, 21 nt, Artificial Sequence
  Description of Artificial Sequence: Synthetic oligonucleotide
uaaugaaucuucggguguuua

SEQ ID NO: 2143 - RNA, 21 nt, Artificial Sequence
  Description of Artificial Sequence: Synthetic oligonucleotide
guggcugguuggugcuuugua

SEQ ID NO: 2144 - RNA, 21 nt, Artificial Sequence
  Description of Artificial Sequence: Synthetic oligonucleotide
aaggaacccaucagcgucaga

SEQ ID NO: 2145 - RNA, 21 nt, Artificial Sequence
  Description of Artificial Sequence: Synthetic oligonucleotide
uuaaaacaaagggcaagagua

SEQ ID NO: 2146 - RNA, 21 nt, Artificial Sequence
  Description of Artificial Sequence: Synthetic oligonucleotide
cuguggcugguuggugcuuua

SEQ ID NO: 2147 - RNA, 21 nt, Artificial Sequence
  Description of Artificial Sequence: Synthetic oligonucleotide
cagcucagccacugaagaaca

SEQ ID NO: 2148 - RNA, 21 nt, Artificial Sequence
  Description of Artificial Sequence: Synthetic oligonucleotide
aaauaaugaaucuucggguga

SEQ ID NO: 2149 - RNA, 21 nt, Artificial Sequence
  Description of Artificial Sequence: Synthetic oligonucleotide
gaaugugugaccuggauugua

SEQ ID NO: 2150 - RNA, 21 nt, Artificial Sequence
  Description of Artificial Sequence: Synthetic oligonucleotide
cauguagggugaugagcacua

SEQ ID NO: 2151 - RNA, 21 nt, Artificial Sequence
  Description of Artificial Sequence: Synthetic oligonucleotide
ggacuggccguucuagguaua

SEQ ID NO: 2152 - RNA, 21 nt, Artificial Sequence
  Description of Artificial Sequence: Synthetic oligonucleotide
auaaauugagcuaguuaagga

SEQ ID NO: 2153 - RNA, 21 nt, Artificial Sequence
  Description of Artificial Sequence: Synthetic oligonucleotide
gaaaguuguugaugugcugga

SEQ ID NO: 2154 - RNA, 21 nt, Artificial Sequence
  Description of Artificial Sequence: Synthetic oligonucleotide
aacaaagggcaagagugcuga

SEQ ID NO: 2155 - RNA, 21 nt, Artificial Sequence
  Description of Artificial Sequence: Synthetic oligonucleotide
ccugagcacuggcauaaggaa

SEQ ID NO: 2156 - RNA, 21 nt, Artificial Sequence
  Description of Artificial Sequence: Synthetic oligonucleotide
ugaugguggacaacuggcgca

SEQ ID NO: 2157 - RNA, 21 nt, Artificial Sequence
  Description of Artificial Sequence: Synthetic oligonucleotide
acaaagggcaagagugcugaa

SEQ ID NO: 2158 - RNA, 21 nt, Artificial Sequence
  Description of Artificial Sequence: Synthetic oligonucleotide
acggaccugagcacuggcaua

SEQ ID NO: 2159 - RNA, 21 nt, Artificial Sequence
  Description of Artificial Sequence: Synthetic oligonucleotide
ugggaaagcugugcagcaaca

SEQ ID NO: 2160 - RNA, 21 nt, Artificial Sequence
  Description of Artificial Sequence: Synthetic oligonucleotide
aacccaucagcgucagcagca

SEQ ID NO: 2161 - RNA, 21 nt, Artificial Sequence
  Description of Artificial Sequence: Synthetic oligonucleotide
agcucagccacugaagaacaa

SEQ ID NO: 2162 - RNA, 21 nt, Artificial Sequence
  Description of Artificial Sequence: Synthetic oligonucleotide
uuuugaagguuggcagcgcua

SEQ ID NO: 2163 - RNA, 21 nt, Artificial Sequence
  Description of Artificial Sequence: Synthetic oligonucleotide
guaugacccuucccugaagca

SEQ ID NO: 2164 - RNA, 21 nt, Artificial Sequence
  Description of Artificial Sequence: Synthetic oligonucleotide
cuacccaggcucacugaccaa

SEQ ID NO: 2165 - RNA, 21 nt, Artificial Sequence
  Description of Artificial Sequence: Synthetic oligonucleotide
acccaggcucacugaccacca

SEQ ID NO: 2166 - RNA, 21 nt, Artificial Sequence
  Description of Artificial Sequence: Synthetic oligonucleotide
auggacuggccguucuaggua

SEQ ID NO: 2167 - RNA, 21 nt, Artificial Sequence
  Description of Artificial Sequence: Synthetic oligonucleotide
accugagcacuggcauaagga

SEQ ID NO: 2168 - RNA, 21 nt, Artificial Sequence
  Description of Artificial Sequence: Synthetic oligonucleotide
ccaucagcgucagcagcgaga

SEQ ID NO: 2169 - RNA, 21 nt, Artificial Sequence
  Description of Artificial Sequence: Synthetic oligonucleotide
uggacuggccguucuagguaa

SEQ ID NO: 2170 - RNA, 21 nt, Artificial Sequence
  Description of Artificial Sequence: Synthetic oligonucleotide
uuuugggaaagcugugcagca

SEQ ID NO: 2171 - RNA, 21 nt, Artificial Sequence
  Description of Artificial Sequence: Synthetic oligonucleotide
cugauggacuggccguucuaa

SEQ ID NO: 2172 - RNA, 21 nt, Artificial Sequence
  Description of Artificial Sequence: Synthetic oligonucleotide
accuacccaggcucacugaca

SEQ ID NO: 2173 - RNA, 21 nt, Artificial Sequence
  Description of Artificial Sequence: Synthetic oligonucleotide
ggaccuacccaggcucacuga

SEQ ID NO: 2174 - RNA, 21 nt, Artificial Sequence
  Description of Artificial Sequence: Synthetic oligonucleotide
gauggacuggccguucuagga

SEQ ID NO: 2175 - RNA, 21 nt, Artificial Sequence
  Description of Artificial Sequence: Synthetic oligonucleotide
aagguuggcagcgcuaaacca

SEQ ID NO: 2176 - RNA, 21 nt, Artificial Sequence
  Description of Artificial Sequence: Synthetic oligonucleotide
ugauggacuggccguucuaga

SEQ ID NO: 2177 - RNA, 21 nt, Artificial Sequence
  Description of Artificial Sequence: Synthetic oligonucleotide
aacugaugguggacaacugga

SEQ ID NO: 2178 - RNA, 21 nt, Artificial Sequence
  Description of Artificial Sequence: Synthetic oligonucleotide
acaacugcuguggcugguuga

SEQ ID NO: 2179 - RNA, 21 nt, Artificial Sequence
  Description of Artificial Sequence: Synthetic oligonucleotide
caacggaccugagcacuggca

SEQ ID NO: 2180 - RNA, 21 nt, Artificial Sequence
  Description of Artificial Sequence: Synthetic oligonucleotide
caacugcuguggcugguugga

SEQ ID NO: 2181 - RNA, 21 nt, Artificial Sequence
  Description of Artificial Sequence: Synthetic oligonucleotide
acugaugguggacaacuggca

SEQ ID NO: 2182 - RNA, 21 nt, Artificial Sequence
  Description of Artificial Sequence: Synthetic oligonucleotide
cugcuguggcugguuggugca

SEQ ID NO: 2183 - DNA, 23 bp, Artificial Sequence
  Description of Artificial Sequence: Synthetic oligonucleotide
  Description of Combined DNA/RNA Molecule: Synthetic oligonucleotide
uuugcutgaucauaggaaacaga

SEQ ID NO: 2184 - RNA, 23 nt, Artificial Sequence
  Description of Artificial Sequence: Synthetic oligonucleotide
ugaucgaaguuagugaagucagc

SEQ ID NO: 2185 - RNA, 23 nt, Artificial Sequence
  Description of Artificial Sequence: Synthetic oligonucleotide
ucuuauuugaaggaagcuuugau

SEQ ID NO: 2186 - DNA, 23 bp, Artificial Sequence
  Description of Artificial Sequence: Synthetic oligonucleotide
  Description of Combined DNA/RNA Molecule: Synthetic oligonucleotide
uuuatutgaaggaagcuuugauu

SEQ ID NO: 2187 - RNA, 23 nt, Artificial Sequence
  Description of Artificial Sequence: Synthetic oligonucleotide
uuucauuauuuggauacagacua

SEQ ID NO: 2188 - DNA, 23 bp, Artificial Sequence
  Description of Artificial Sequence: Synthetic oligonucleotide
  Description of Combined DNA/RNA Molecule: Synthetic oligonucleotide
uuucautauuuggauacagacua

SEQ ID NO: 2189 - DNA, 23 bp, Artificial Sequence
  Description of Artificial Sequence: Synthetic oligonucleotide
  Description of Combined DNA/RNA Molecule: Synthetic oligonucleotide
uugaagtuaaguuuacggaauuu

SEQ ID NO: 2190 - DNA, 23 bp, Artificial Sequence
  Description of Artificial Sequence: Synthetic oligonucleotide
  Description of Combined DNA/RNA Molecule: Synthetic oligonucleotide
ugaagutgcuugaucauaggaaa

SEQ ID NO: 2191 - DNA, 23 bp, Artificial Sequence
  Description of Artificial Sequence: Synthetic oligonucleotide
  Description of Combined DNA/RNA Molecule: Synthetic oligonucleotide
uguugctugaucauaggaaacag

SEQ ID NO: 2192 - DNA, 23 bp, Artificial Sequence
  Description of Artificial Sequence: Synthetic oligonucleotide
  Description of Combined DNA/RNA Molecule: Synthetic oligonucleotide
ucuatgtuuuaaaagcagcauuu

SEQ ID NO: 2193 - DNA, 23 bp, Artificial Sequence
  Description of Artificial Sequence: Synthetic oligonucleotide
  Description of Combined DNA/RNA Molecule: Synthetic oligonucleotide
uuaugatauauugucugaaugga

SEQ ID NO: 2194 - RNA, 23 nt, Artificial Sequence
  Description of Artificial Sequence: Synthetic oligonucleotide
uggaucgaaguuagugaagucag

SEQ ID NO: 2195 - RNA, 23 nt, Artificial Sequence
  Description of Artificial Sequence: Synthetic oligonucleotide
uaugauauauugucugaauggaa

SEQ ID NO: 2196 - DNA, 23 bp, Artificial Sequence
  Description of Artificial Sequence: Synthetic oligonucleotide
  Description of Combined DNA/RNA Molecule: Synthetic oligonucleotide
uauucatuauuuggauacagacu

SEQ ID NO: 2197 - DNA, 23 bp, Artificial Sequence
  Description of Artificial Sequence: Synthetic oligonucleotide
  Description of Combined DNA/RNA Molecule: Synthetic oligonucleotide
uauutgaaggaagcuuugauuug

SEQ ID NO: 2198 - DNA, 23 bp, Artificial Sequence
  Description of Artificial Sequence: Synthetic oligonucleotide
  Description of Combined DNA/RNA Molecule: Synthetic oligonucleotide
uuuatgauauauugucugaaugg

SEQ ID NO: 2199 - RNA, 23 nt, Artificial Sequence
  Description of Artificial Sequence: Synthetic oligonucleotide
ucauugaaguuaaguuuacggaa

SEQ ID NO: 2200 - DNA, 23 bp, Artificial Sequence
  Description of Artificial Sequence: Synthetic oligonucleotide
  Description of Combined DNA/RNA Molecule: Synthetic oligonucleotide
ucautgaaguuaaguuuacggaa

SEQ ID NO: 2201 - DNA, 23 bp, Artificial Sequence
  Description of Artificial Sequence: Synthetic oligonucleotide
  Description of Combined DNA/RNA Molecule: Synthetic oligonucleotide
ugaagutagugaagucagcacuc

SEQ ID NO: 2202 - RNA, 23 nt, Artificial Sequence
  Description of Artificial Sequence: Synthetic oligonucleotide
uaucuuauuugaaggaagcuuug

SEQ ID NO: 2203 - DNA, 23 bp, Artificial Sequence
  Description of Artificial Sequence: Synthetic oligonucleotide
  Description of Combined DNA/RNA Molecule: Synthetic oligonucleotide
uauctuauuugaaggaagcuuug

SEQ ID NO: 2204 - RNA, 23 nt, Artificial Sequence
  Description of Artificial Sequence: Synthetic oligonucleotide
uaaguuaaguuuacggaauuuca

SEQ ID NO: 2205 - DNA, 23 bp, Artificial Sequence
  Description of Artificial Sequence: Synthetic oligonucleotide
  Description of Combined DNA/RNA Molecule: Synthetic oligonucleotide
uugatcauaggaaacagacaggg

SEQ ID NO: 2206 - RNA, 23 nt, Artificial Sequence
  Description of Artificial Sequence: Synthetic oligonucleotide
uaagauucauuauuuggauacag

SEQ ID NO: 2207 - DNA, 23 bp, Artificial Sequence
  Description of Artificial Sequence: Synthetic oligonucleotide
  Description of Combined DNA/RNA Molecule: Synthetic oligonucleotide
uaagautcauuauuuggauacag

SEQ ID NO: 2208 - RNA, 23 nt, Artificial Sequence
  Description of Artificial Sequence: Synthetic oligonucleotide
uaucgaaguuagugaagucagca

SEQ ID NO: 2209 - RNA, 23 nt, Artificial Sequence
  Description of Artificial Sequence: Synthetic oligonucleotide
uccaucuuauuugaaggaagcuu

SEQ ID NO: 2210 - DNA, 23 bp, Artificial Sequence
  Description of Artificial Sequence: Synthetic oligonucleotide
  Description of Combined DNA/RNA Molecule: Synthetic oligonucleotide
uccatctuauuugaaggaagcuu

SEQ ID NO: 2211 - DNA, 23 bp, Artificial Sequence
  Description of Artificial Sequence: Synthetic oligonucleotide
  Description of Combined DNA/RNA Molecule: Synthetic oligonucleotide
uuuugaaggaagcuuugauuugc

SEQ ID NO: 2212 - RNA, 23 nt, Artificial Sequence
  Description of Artificial Sequence: Synthetic oligonucleotide
ucaucuuauuugaaggaagcuuu

SEQ ID NO: 2213 - RNA, 23 nt, Artificial Sequence
  Description of Artificial Sequence: Synthetic oligonucleotide
uccuauguuuuaaaagcagcauu

SEQ ID NO: 2214 - RNA, 23 nt, Artificial Sequence
  Description of Artificial Sequence: Synthetic oligonucleotide
uaaggaagcuuugauuugccugu

SEQ ID NO: 2215 - DNA, 23 bp, Artificial Sequence
  Description of Artificial Sequence: Synthetic oligonucleotide
  Description of Combined DNA/RNA Molecule: Synthetic oligonucleotide
uaaggaagcuuugauuugccugu

SEQ ID NO: 2216 - DNA, 23 bp, Artificial Sequence
  Description of Artificial Sequence: Synthetic oligonucleotide
  Description of Combined DNA/RNA Molecule: Synthetic oligonucleotide
ugaaggaagcuuugauuugccug

SEQ ID NO: 2217 - RNA, 23 nt, Artificial Sequence
  Description of Artificial Sequence: Synthetic oligonucleotide
uucuuauuugaaggaagcuuuga

SEQ ID NO: 2218 - DNA, 23 bp, Artificial Sequence
  Description of Artificial Sequence: Synthetic oligonucleotide
  Description of Combined DNA/RNA Molecule: Synthetic oligonucleotide
uucutatuugaaggaagcuuuga

SEQ ID NO: 2219 - RNA, 23 nt, Artificial Sequence
  Description of Artificial Sequence: Synthetic oligonucleotide
uguuuuaaaagcagcauuuuagu

SEQ ID NO: 2220 - DNA, 23 bp, Artificial Sequence
  Description of Artificial Sequence: Synthetic oligonucleotide
  Description of Combined DNA/RNA Molecule: Synthetic oligonucleotide
uagucaagguacuuuauucuuau

SEQ ID NO: 2221 - RNA, 23 nt, Artificial Sequence
  Description of Artificial Sequence: Synthetic oligonucleotide
uaagucaagguacuuuauucuua

SEQ ID NO: 2222 - DNA, 23 bp, Artificial Sequence
  Description of Artificial Sequence: Synthetic oligonucleotide
  Description of Combined DNA/RNA Molecule: Synthetic oligonucleotide
uaagtcaagguacuuuauucuua

SEQ ID NO: 2223 - DNA, 23 bp, Artificial Sequence
  Description of Artificial Sequence: Synthetic oligonucleotide
  Description of Combined DNA/RNA Molecule: Synthetic oligonucleotide
ucuugatcauaggaaacagacag

SEQ ID NO: 2224 - DNA, 23 bp, Artificial Sequence
  Description of Artificial Sequence: Synthetic oligonucleotide
  Description of Combined DNA/RNA Molecule: Synthetic oligonucleotide
uauugaaguuaaguuuacggaau

SEQ ID NO: 2225 - DNA, 23 bp, Artificial Sequence
  Description of Artificial Sequence: Synthetic oligonucleotide
  Description of Combined DNA/RNA Molecule: Synthetic oligonucleotide
ugucacacauuccagaagaggag

SEQ ID NO: 2226 - DNA, 23 bp, Artificial Sequence
  Description of Artificial Sequence: Synthetic oligonucleotide
  Description of Combined DNA/RNA Molecule: Synthetic oligonucleotide
ugaagatucauuauuuggauaca

SEQ ID NO: 2227 - DNA, 23 bp, Artificial Sequence
  Description of Artificial Sequence: Synthetic oligonucleotide
  Description of Combined DNA/RNA Molecule: Synthetic oligonucleotide
ugcutgaucauaggaaacagaca

SEQ ID NO: 2228 - DNA, 23 bp, Artificial Sequence
  Description of Artificial Sequence: Synthetic oligonucleotide
  Description of Combined DNA/RNA Molecule: Synthetic oligonucleotide
uguatgagugucgaugucaacag

SEQ ID NO: 2229 - RNA, 23 nt, Artificial Sequence
  Description of Artificial Sequence: Synthetic oligonucleotide
uugaacaaagucaagguacuuua

SEQ ID NO: 2230 - DNA, 23 bp, Artificial Sequence
  Description of Artificial Sequence: Synthetic oligonucleotide
  Description of Combined DNA/RNA Molecule: Synthetic oligonucleotide
uugaacaaagucaagguacuuua

SEQ ID NO: 2231 - DNA, 23 bp, Artificial Sequence
  Description of Artificial Sequence: Synthetic oligonucleotide
  Description of Combined DNA/RNA Molecule: Synthetic oligonucleotide
uaaatcaccaagguagaucugug

SEQ ID NO: 2232 - DNA, 23 bp, Artificial Sequence
  Description of Artificial Sequence: Synthetic oligonucleotide
  Description of Combined DNA/RNA Molecule: Synthetic oligonucleotide
uguucctugagcacaauccaggu

SEQ ID NO: 2233 - DNA, 23 bp, Artificial Sequence
  Description of Artificial Sequence: Synthetic oligonucleotide
  Description of Combined DNA/RNA Molecule: Synthetic oligonucleotide
uuuucctauguuuuaaaagcagc

SEQ ID NO: 2234 - RNA, 23 nt, Artificial Sequence
  Description of Artificial Sequence: Synthetic oligonucleotide
ucgaaguuagugaagucagcacu

SEQ ID NO: 2235 - DNA, 23 bp, Artificial Sequence
  Description of Artificial Sequence: Synthetic oligonucleotide
  Description of Combined DNA/RNA Molecule: Synthetic oligonucleotide
ucgaagtuagugaagucagcacu

SEQ ID NO: 2236 - RNA, 23 nt, Artificial Sequence
  Description of Artificial Sequence: Synthetic oligonucleotide
uaguuaaguuuacggaauuucaa

SEQ ID NO: 2237 - DNA, 23 bp, Artificial Sequence
  Description of Artificial Sequence: Synthetic oligonucleotide
  Description of Combined DNA/RNA Molecule: Synthetic oligonucleotide
uagutaaguuuacggaauuucaa

SEQ ID NO: 2238 - RNA, 23 nt, Artificial Sequence
  Description of Artificial Sequence: Synthetic oligonucleotide
uauuuuaccugauuugccuuaac

SEQ ID NO: 2239 - DNA, 23 bp, Artificial Sequence
  Description of Artificial Sequence: Synthetic oligonucleotide
  Description of Combined DNA/RNA Molecule: Synthetic oligonucleotide
uauutuaccugauuugccuuaac

SEQ ID NO: 2240 - RNA, 23 nt, Artificial Sequence
  Description of Artificial Sequence: Synthetic oligonucleotide
uuucaaaaaaauaccuagaacgg

SEQ ID NO: 2241 - DNA, 23 bp, Artificial Sequence
  Description of Artificial Sequence: Synthetic oligonucleotide
  Description of Combined DNA/RNA Molecule: Synthetic oligonucleotide
uuaacuagcucaauuuaucuugu

SEQ ID NO: 2242 - DNA, 23 bp, Artificial Sequence
  Description of Artificial Sequence: Synthetic oligonucleotide
  Description of Combined DNA/RNA Molecule: Synthetic oligonucleotide
uguagatcugugcuuagcuaaag

SEQ ID NO: 2243 - DNA, 23 bp, Artificial Sequence
  Description of Artificial Sequence: Synthetic oligonucleotide
  Description of Combined DNA/RNA Molecule: Synthetic oligonucleotide
ugaggatcgaaguuagugaaguc

SEQ ID NO: 2244 - DNA, 23 bp, Artificial Sequence
  Description of Artificial Sequence: Synthetic oligonucleotide
  Description of Combined DNA/RNA Molecule: Synthetic oligonucleotide
ugaagutaaguuuacggaauuuc

SEQ ID NO: 2245 - DNA, 23 bp, Artificial Sequence
  Description of Artificial Sequence: Synthetic oligonucleotide
  Description of Combined DNA/RNA Molecule: Synthetic oligonucleotide
uuuccuauguuuuaaaagcagca

SEQ ID NO: 2246 - DNA, 23 bp, Artificial Sequence
  Description of Artificial Sequence: Synthetic oligonucleotide
  Description of Combined DNA/RNA Molecule: Synthetic oligonucleotide
uaugagtgucgaugucaacaggg

SEQ ID NO: 2247 - DNA, 23 bp, Artificial Sequence
  Description of Artificial Sequence: Synthetic oligonucleotide
  Description of Combined DNA/RNA Molecule: Synthetic oligonucleotide
ucgaggaucgaaguuagugaagu

SEQ ID NO: 2248 - DNA, 23 bp, Artificial Sequence
  Description of Artificial Sequence: Synthetic oligonucleotide
  Description of Combined DNA/RNA Molecule: Synthetic oligonucleotide
uaagguagaucugugcuuagcua

SEQ ID NO: 2249 - RNA, 23 nt, Artificial Sequence
  Description of Artificial Sequence: Synthetic oligonucleotide
uaacaaagucaagguacuuuauu

SEQ ID NO: 2250 - DNA, 23 bp, Artificial Sequence
  Description of Artificial Sequence: Synthetic oligonucleotide
  Description of Combined DNA/RNA Molecule: Synthetic oligonucleotide
uugututaaaagcagcauuuuag

SEQ ID NO: 2251 - RNA, 23 nt, Artificial Sequence
  Description of Artificial Sequence: Synthetic oligonucleotide
uuccuauguuuuaaaagcagcau

SEQ ID NO: 2252 - DNA, 23 bp, Artificial Sequence
  Description of Artificial Sequence: Synthetic oligonucleotide
  Description of Combined DNA/RNA Molecule: Synthetic oligonucleotide
uucctatguuuuaaaagcagcau

SEQ ID NO: 2253 - RNA, 23 nt, Artificial Sequence
  Description of Artificial Sequence: Synthetic oligonucleotide
uuacauuacauagaaucaugacu

SEQ ID NO: 2254 - DNA, 23 bp, Artificial Sequence
  Description of Artificial Sequence: Synthetic oligonucleotide
  Description of Combined DNA/RNA Molecule: Synthetic oligonucleotide
uuacautacauagaaucaugacu

SEQ ID NO: 2255 - RNA, 23 nt, Artificial Sequence
  Description of Artificial Sequence: Synthetic oligonucleotide
uaaguuagugaagucagcacucu

SEQ ID NO: 2256 - DNA, 23 bp, Artificial Sequence
  Description of Artificial Sequence: Synthetic oligonucleotide
  Description of Combined DNA/RNA Molecule: Synthetic oligonucleotide
ucaaggtagaucugugcuuagcu

SEQ ID NO: 2257 - RNA, 23 nt, Artificial Sequence
  Description of Artificial Sequence: Synthetic oligonucleotide
ucacgaggaucgaaguuagugaa

SEQ ID NO: 2258 - DNA, 23 bp, Artificial Sequence
  Description of Artificial Sequence: Synthetic oligonucleotide
  Description of Combined DNA/RNA Molecule: Synthetic oligonucleotide
uuugautugccuguucuucagug

SEQ ID NO: 2259 - RNA, 23 nt, Artificial Sequence
  Description of Artificial Sequence: Synthetic oligonucleotide
ugaacaaagucaagguacuuuau

SEQ ID NO: 2260 - DNA, 23 bp, Artificial Sequence
  Description of Artificial Sequence: Synthetic oligonucleotide
  Description of Combined DNA/RNA Molecule: Synthetic oligonucleotide
uacuactaccauaaacaaagcac

SEQ ID NO: 2261 - DNA, 23 bp, Artificial Sequence
  Description of Artificial Sequence: Synthetic oligonucleotide
  Description of Combined DNA/RNA Molecule: Synthetic oligonucleotide
uuuacatuacauagaaucaugac

SEQ ID NO: 2262 - RNA, 23 nt, Artificial Sequence
  Description of Artificial Sequence: Synthetic oligonucleotide
uucaaaaaaauaccuagaacggc

SEQ ID NO: 2263 - RNA, 23 nt, Artificial Sequence
  Description of Artificial Sequence: Synthetic oligonucleotide
ucuucaaaaaaauaccuagaacg

SEQ ID NO: 2264 - RNA, 23 nt, Artificial Sequence
  Description of Artificial Sequence: Synthetic oligonucleotide
uauccaaggauucaggaaggagg

SEQ ID NO: 2265 - DNA, 23 bp, Artificial Sequence
  Description of Artificial Sequence: Synthetic oligonucleotide
  Description of Combined DNA/RNA Molecule: Synthetic oligonucleotide
uauccaaggauucaggaaggagg

SEQ ID NO: 2266 - RNA, 23 nt, Artificial Sequence
  Description of Artificial Sequence: Synthetic oligonucleotide
uuuaaaagcagcauuuuagucaa

SEQ ID NO: 2267 - DNA, 23 bp, Artificial Sequence
  Description of Artificial Sequence: Synthetic oligonucleotide
  Description of Combined DNA/RNA Molecule: Synthetic oligonucleotide
uuuaaaagcagcauuuuagucaa

SEQ ID NO: 2268 - DNA, 23 bp, Artificial Sequence
  Description of Artificial Sequence: Synthetic oligonucleotide
  Description of Combined DNA/RNA Molecule: Synthetic oligonucleotide
ugaagctuugauuugccuguucu

SEQ ID NO: 2269 - RNA, 23 nt, Artificial Sequence
  Description of Artificial Sequence: Synthetic oligonucleotide
uaauccaaggauucaggaaggag

SEQ ID NO: 2270 - DNA, 23 bp, Artificial Sequence
  Description of Artificial Sequence: Synthetic oligonucleotide
  Description of Combined DNA/RNA Molecule: Synthetic oligonucleotide
ucuutgtccugagagucaucaaa

SEQ ID NO: 2271 - DNA, 23 bp, Artificial Sequence
  Description of Artificial Sequence: Synthetic oligonucleotide
  Description of Combined DNA/RNA Molecule: Synthetic oligonucleotide
ucugagagucaucaaacuccacg

SEQ ID NO: 2272 - RNA, 23 nt, Artificial Sequence
  Description of Artificial Sequence: Synthetic oligonucleotide
ucgaagauucauuauuuggauac

SEQ ID NO: 2273 - DNA, 23 bp, Artificial Sequence
  Description of Artificial Sequence: Synthetic oligonucleotide
  Description of Combined DNA/RNA Molecule: Synthetic oligonucleotide
ucgaagauucauuauuuggauac

SEQ ID NO: 2274 - DNA, 23 bp, Artificial Sequence
  Description of Artificial Sequence: Synthetic oligonucleotide
  Description of Combined DNA/RNA Molecule: Synthetic oligonucleotide
ucaugctgugaacaaagucaagg

SEQ ID NO: 2275 - RNA, 23 nt, Artificial Sequence
  Description of Artificial Sequence: Synthetic oligonucleotide
ucaaaucaccaagguagaucugu

SEQ ID NO: 2276 - RNA, 23 nt, Artificial Sequence
  Description of Artificial Sequence: Synthetic oligonucleotide
uuacagaaaaacuacuaccauaa

SEQ ID NO: 2277 - DNA, 23 bp, Artificial Sequence
  Description of Artificial Sequence: Synthetic oligonucleotide
  Description of Combined DNA/RNA Molecule: Synthetic oligonucleotide
uuacagaaaaacuacuaccauaa

SEQ ID NO: 2278 - DNA, 23 bp, Artificial Sequence
  Description of Artificial Sequence: Synthetic oligonucleotide
  Description of Combined DNA/RNA Molecule: Synthetic oligonucleotide
uugctgtgaacaaagucaaggua

SEQ ID NO: 2279 - DNA, 23 bp, Artificial Sequence
  Description of Artificial Sequence: Synthetic oligonucleotide
  Description of Combined DNA/RNA Molecule: Synthetic oligonucleotide
uuuccutgagcacaauccagguc

SEQ ID NO: 2280 - DNA, 23 bp, Artificial Sequence
  Description of Artificial Sequence: Synthetic oligonucleotide
  Description of Combined DNA/RNA Molecule: Synthetic oligonucleotide
uugatutgccuuaacuagcucaa

SEQ ID NO: 2281 - DNA, 23 bp, Artificial Sequence
  Description of Artificial Sequence: Synthetic oligonucleotide
  Description of Combined DNA/RNA Molecule: Synthetic oligonucleotide
uugatutgccuguucuucagugg

SEQ ID NO: 2282 - DNA, 23 bp, Artificial Sequence
  Description of Artificial Sequence: Synthetic oligonucleotide
  Description of Combined DNA/RNA Molecule: Synthetic oligonucleotide
uuuugatuugccuguucuucagu

SEQ ID NO: 2283 - RNA, 23 nt, Artificial Sequence
  Description of Artificial Sequence: Synthetic oligonucleotide
ucacacauuccagaagaggaggg

SEQ ID NO: 2284 - DNA, 23 bp, Artificial Sequence
  Description of Artificial Sequence: Synthetic oligonucleotide
  Description of Combined DNA/RNA Molecule: Synthetic oligonucleotide
ucacacauuccagaagaggaggg

SEQ ID NO: 2285 - RNA, 23 nt, Artificial Sequence
  Description of Artificial Sequence: Synthetic oligonucleotide
uucaaacuccacguugaaagcau

SEQ ID NO: 2286 - RNA, 23 nt, Artificial Sequence
  Description of Artificial Sequence: Synthetic oligonucleotide
ucaaacuccacguugaaagcaug

SEQ ID NO: 2287 - DNA, 23 bp, Artificial Sequence
  Description of Artificial Sequence: Synthetic oligonucleotide
  Description of Combined DNA/RNA Molecule: Synthetic oligonucleotide
ucaaactccacguugaaagcaug

SEQ ID NO: 2288 - DNA, 23 bp, Artificial Sequence
  Description of Artificial Sequence: Synthetic oligonucleotide
  Description of Combined DNA/RNA Molecule: Synthetic oligonucleotide
uaaucatgacuauuuuaccugau

SEQ ID NO: 2289 - DNA, 23 bp, Artificial Sequence
  Description of Artificial Sequence: Synthetic oligonucleotide
  Description of Combined DNA/RNA Molecule: Synthetic oligonucleotide
ugautcauuauuuggauacagac

SEQ ID NO: 2290 - DNA, 23 bp, Artificial Sequence
  Description of Artificial Sequence: Synthetic oligonucleotide
  Description of Combined DNA/RNA Molecule: Synthetic oligonucleotide
uuaututaccugauuugccuuaa

SEQ ID NO: 2291 - RNA, 23 nt, Artificial Sequence
  Description of Artificial Sequence: Synthetic oligonucleotide
uccaaggauucaggaaggaggcc

SEQ ID NO: 2292 - DNA, 23 bp, Artificial Sequence
  Description of Artificial Sequence: Synthetic oligonucleotide
  Description of Combined DNA/RNA Molecule: Synthetic oligonucleotide
ugaccatcuuauuugaaggaagc

SEQ ID NO: 2293 - DNA, 23 bp, Artificial Sequence
  Description of Artificial Sequence: Synthetic oligonucleotide
  Description of Combined DNA/RNA Molecule: Synthetic oligonucleotide
uuuaagtuuacggaauuucaaca

SEQ ID NO: 2294 - DNA, 23 bp, Artificial Sequence
  Description of Artificial Sequence: Synthetic oligonucleotide
  Description of Combined DNA/RNA Molecule: Synthetic oligonucleotide
uauacutggcuguaugagugucg

SEQ ID NO: 2295 - RNA, 23 nt, Artificial Sequence
  Description of Artificial Sequence: Synthetic oligonucleotide
uucaccaagguagaucugugcuu

SEQ ID NO: 2296 - RNA, 23 nt, Artificial Sequence
  Description of Artificial Sequence: Synthetic oligonucleotide
uaucaaacuccacguugaaagca

SEQ ID NO: 2297 - DNA, 23 bp, Artificial Sequence
  Description of Artificial Sequence: Synthetic oligonucleotide
  Description of Combined DNA/RNA Molecule: Synthetic oligonucleotide
ugguagaucugugcuuagcuaaa

SEQ ID NO: 2298 - RNA, 23 nt, Artificial Sequence
  Description of Artificial Sequence: Synthetic oligonucleotide
uaaauauacucuguaucacaacu

SEQ ID NO: 2299 - RNA, 23 nt, Artificial Sequence
  Description of Artificial Sequence: Synthetic oligonucleotide
uucauacuuggcuguaugagugu

SEQ ID NO: 2300 - DNA, 23 bp, Artificial Sequence
  Description of Artificial Sequence: Synthetic oligonucleotide
  Description of Combined DNA/RNA Molecule: Synthetic oligonucleotide
uuuacctgauuugccuuaacuag

SEQ ID NO: 2301 - RNA, 23 nt, Artificial Sequence
  Description of Artificial Sequence: Synthetic oligonucleotide
uaauauacucuguaucacaacuc

SEQ ID NO: 2302 - DNA, 23 bp, Artificial Sequence
  Description of Artificial Sequence: Synthetic oligonucleotide
  Description of Combined DNA/RNA Molecule: Synthetic oligonucleotide
uaauauacucuguaucacaacuc

SEQ ID NO: 2303 - RNA, 23 nt, Artificial Sequence
  Description of Artificial Sequence: Synthetic oligonucleotide
ucuguaugagugucgaugucaac

SEQ ID NO: 2304 - DNA, 23 bp, Artificial Sequence
  Description of Artificial Sequence: Synthetic oligonucleotide
  Description of Combined DNA/RNA Molecule: Synthetic oligonucleotide
uuuaactagcucaauuuaucuug

SEQ ID NO: 2305 - RNA, 23 nt, Artificial Sequence
  Description of Artificial Sequence: Synthetic oligonucleotide
uaaccuucaaaaaaauaccuaga

SEQ ID NO: 2306 - DNA, 23 bp, Artificial Sequence
  Description of Artificial Sequence: Synthetic oligonucleotide
  Description of Combined DNA/RNA Molecule: Synthetic oligonucleotide
uaaccutcaaaaaaauaccuaga

SEQ ID NO: 2307 - RNA, 23 nt, Artificial Sequence
  Description of Artificial Sequence: Synthetic oligonucleotide
ucuaccauaaacaaagcaccaac

SEQ ID NO: 2308 - RNA, 23 nt, Artificial Sequence
  Description of Artificial Sequence: Synthetic oligonucleotide
ugaaauauacucuguaucacaac

SEQ ID NO: 2309 - DNA, 23 bp, Artificial Sequence
  Description of Artificial Sequence: Synthetic oligonucleotide
  Description of Combined DNA/RNA Molecule: Synthetic oligonucleotide
uaggtcacacauuccagaagagg

SEQ ID NO: 2310 - RNA, 23 nt, Artificial Sequence
  Description of Artificial Sequence: Synthetic oligonucleotide
uaaaauaccuagaacggccaguc

SEQ ID NO: 2311 - DNA, 23 bp, Artificial Sequence
  Description of Artificial Sequence: Synthetic oligonucleotide
  Description of Combined DNA/RNA Molecule: Synthetic oligonucleotide
uucatgacuauuuuaccugauuu

SEQ ID NO: 2312 - DNA, 23 bp, Artificial Sequence
  Description of Artificial Sequence: Synthetic oligonucleotide
  Description of Combined DNA/RNA Molecule: Synthetic oligonucleotide
uugccctuuguuuuaauggaauc

SEQ ID NO: 2313 - DNA, 23 bp, Artificial Sequence
  Description of Artificial Sequence: Synthetic oligonucleotide
  Description of Combined DNA/RNA Molecule: Synthetic oligonucleotide
uuagtgaagucagcacucuugcc

SEQ ID NO: 2314 - RNA, 23 nt, Artificial Sequence
  Description of Artificial Sequence: Synthetic oligonucleotide
ucaucaaacuccacguugaaagc

SEQ ID NO: 2315 - RNA, 23 nt, Artificial Sequence
  Description of Artificial Sequence: Synthetic oligonucleotide
uuaccauaaacaaagcaccaacc

SEQ ID NO: 2316 - DNA, 23 bp, Artificial Sequence
  Description of Artificial Sequence: Synthetic oligonucleotide
  Description of Combined DNA/RNA Molecule: Synthetic oligonucleotide
uuaccataaacaaagcaccaacc

SEQ ID NO: 2317 - RNA, 23 nt, Artificial Sequence
  Description of Artificial Sequence: Synthetic oligonucleotide
ucauacuuggcuguaugaguguc

SEQ ID NO: 2318 - RNA, 23 nt, Artificial Sequence
  Description of Artificial Sequence: Synthetic oligonucleotide
uacaaagucaagguacuuuauuc

SEQ ID NO: 2319 - DNA, 23 bp, Artificial Sequence
  Description of Artificial Sequence: Synthetic oligonucleotide
  Description of Combined DNA/RNA Molecule: Synthetic oligonucleotide
ucuctgtaauucaaaagucauua

SEQ ID NO: 2320 - RNA, 23 nt, Artificial Sequence
  Description of Artificial Sequence: Synthetic oligonucleotide
uacauuacauagaaucaugacua

SEQ ID NO: 2321 - DNA, 23 bp, Artificial Sequence
  Description of Artificial Sequence: Synthetic oligonucleotide
  Description of Combined DNA/RNA Molecule: Synthetic oligonucleotide
uccutgagcacaauccaggucac

SEQ ID NO: 2322 - DNA, 23 bp, Artificial Sequence
  Description of Artificial Sequence: Synthetic oligonucleotide
  Description of Combined DNA/RNA Molecule: Synthetic oligonucleotide
ugcuguaugagugucgaugucaa

SEQ ID NO: 2323 - DNA, 23 bp, Artificial Sequence
  Description of Artificial Sequence: Synthetic oligonucleotide
  Description of Combined DNA/RNA Molecule: Synthetic oligonucleotide
ucuutgauuugccuguucuucag

SEQ ID NO: 2324 - RNA, 23 nt, Artificial Sequence
  Description of Artificial Sequence: Synthetic oligonucleotide
uccauugaaguuaaguuuacgga

SEQ ID NO: 2325 - DNA, 23 bp, Artificial Sequence
  Description of Artificial Sequence: Synthetic oligonucleotide
  Description of Combined DNA/RNA Molecule: Synthetic oligonucleotide
ugaatcaugacuauuuuaccuga

SEQ ID NO: 2326 - DNA, 23 bp, Artificial Sequence
  Description of Artificial Sequence: Synthetic oligonucleotide
  Description of Combined DNA/RNA Molecule: Synthetic oligonucleotide
uugugaacaaagucaagguacuu

SEQ ID NO: 2327 - RNA, 23 nt, Artificial Sequence
  Description of Artificial Sequence: Synthetic oligonucleotide
ucaaaaaaauaccuagaacggcc

SEQ ID NO: 2328 - RNA, 23 nt, Artificial Sequence
  Description of Artificial Sequence: Synthetic oligonucleotide
uagaaaaacuacuaccauaaaca

SEQ ID NO: 2329 - DNA, 23 bp, Artificial Sequence
  Description of Artificial Sequence: Synthetic oligonucleotide
  Description of Combined DNA/RNA Molecule: Synthetic oligonucleotide
ugagagtcaucaaacuccacguu

SEQ ID NO: 2330 - DNA, 23 bp, Artificial Sequence
  Description of Artificial Sequence: Synthetic oligonucleotide
  Description of Combined DNA/RNA Molecule: Synthetic oligonucleotide
uucatcaaacuccacguugaaag

SEQ ID NO: 2331 - DNA, 23 bp, Artificial Sequence
  Description of Artificial Sequence: Synthetic oligonucleotide
  Description of Combined DNA/RNA Molecule: Synthetic oligonucleotide
uuauactcuguaucacaacucua

SEQ ID NO: 2332 - RNA, 23 nt, Artificial Sequence
  Description of Artificial Sequence: Synthetic oligonucleotide
ucugugaacaaagucaagguacu

SEQ ID NO: 2333 - DNA, 23 bp, Artificial Sequence
  Description of Artificial Sequence: Synthetic oligonucleotide
  Description of Combined DNA/RNA Molecule: Synthetic oligonucleotide
ucugtgaacaaagucaagguacu

SEQ ID NO: 2334 - DNA, 23 bp, Artificial Sequence
  Description of Artificial Sequence: Synthetic oligonucleotide
  Description of Combined DNA/RNA Molecule: Synthetic oligonucleotide
uuactctguaucacaacucuaau

SEQ ID NO: 2335 - DNA, 23 bp, Artificial Sequence
  Description of Artificial Sequence: Synthetic oligonucleotide
  Description of Combined DNA/RNA Molecule: Synthetic oligonucleotide
ugugcuauggauuugcacucaac

SEQ ID NO: 2336 - DNA, 23 bp, Artificial Sequence
  Description of Artificial Sequence: Synthetic oligonucleotide
  Description of Combined DNA/RNA Molecule: Synthetic oligonucleotide
uugacuauuuuaccugauuugcc

SEQ ID NO: 2337 - RNA, 23 nt, Artificial Sequence
  Description of Artificial Sequence: Synthetic oligonucleotide
uaccaagguagaucugugcuuag

SEQ ID NO: 2338 - RNA, 23 nt, Artificial Sequence
  Description of Artificial Sequence: Synthetic oligonucleotide
ucuacaugcugugaacaaaguca

SEQ ID NO: 2339 - RNA, 23 nt, Artificial Sequence
  Description of Artificial Sequence: Synthetic oligonucleotide
uaaaaauaccuagaacggccagu

SEQ ID NO: 2340 - DNA, 23 bp, Artificial Sequence
  Description of Artificial Sequence: Synthetic oligonucleotide
  Description of Combined DNA/RNA Molecule: Synthetic oligonucleotide
uagggaagggucauacuuggcug

SEQ ID NO: 2341 - RNA, 23 nt, Artificial Sequence
  Description of Artificial Sequence: Synthetic oligonucleotide
uacagaaaaacuacuaccauaaa

SEQ ID NO: 2342 - DNA, 23 bp, Artificial Sequence
  Description of Artificial Sequence: Synthetic oligonucleotide
  Description of Combined DNA/RNA Molecule: Synthetic oligonucleotide
uuugcctuaacuagcucaauuua

SEQ ID NO: 2343 - RNA, 23 nt, Artificial Sequence
  Description of Artificial Sequence: Synthetic oligonucleotide
uuuuaaaagcagcauuuuaguca

SEQ ID NO: 2344 - DNA, 23 bp, Artificial Sequence
  Description of Artificial Sequence: Synthetic oligonucleotide
  Description of Combined DNA/RNA Molecule: Synthetic oligonucleotide
uuccagtgaaccaagugaaguuc

SEQ ID NO: 2345 - RNA, 23 nt, Artificial Sequence
  Description of Artificial Sequence: Synthetic oligonucleotide
uccuucaaaaaaauaccuagaac

SEQ ID NO: 2346 - RNA, 23 nt, Artificial Sequence
  Description of Artificial Sequence: Synthetic oligonucleotide
ucaccaagguagaucugugcuua

SEQ ID NO: 2347 - RNA, 23 nt, Artificial Sequence
  Description of Artificial Sequence: Synthetic oligonucleotide
uaaaaaaauaccuagaacggcca

SEQ ID NO: 2348 - RNA, 23 nt, Artificial Sequence
  Description of Artificial Sequence: Synthetic oligonucleotide
uuuuuaaaagcagcauuuuaguc

SEQ ID NO: 2349 - DNA, 23 bp, Artificial Sequence
  Description of Artificial Sequence: Synthetic oligonucleotide
  Description of Combined DNA/RNA Molecule: Synthetic oligonucleotide
uaagcutugauuugccuguucuu

SEQ ID NO: 2350 - RNA, 23 nt, Artificial Sequence
  Description of Artificial Sequence: Synthetic oligonucleotide
ucuacuaccauaaacaaagcacc

SEQ ID NO: 2351 - DNA, 23 bp, Artificial Sequence
  Description of Artificial Sequence: Synthetic oligonucleotide
  Description of Combined DNA/RNA Molecule: Synthetic oligonucleotide
uucuguaucacaacucuaauuau

SEQ ID NO: 2352 - RNA, 23 nt, Artificial Sequence
  Description of Artificial Sequence: Synthetic oligonucleotide
uauaaacaaagcaccaaccagcc

SEQ ID NO: 2353 - DNA, 23 bp, Artificial Sequence
  Description of Artificial Sequence: Synthetic oligonucleotide
  Description of Combined DNA/RNA Molecule: Synthetic oligonucleotide
uggaccaucuuauuugaaggaag

SEQ ID NO: 2354 - DNA, 23 bp, Artificial Sequence
  Description of Artificial Sequence: Synthetic oligonucleotide
  Description of Combined DNA/RNA Molecule: Synthetic oligonucleotide
ucaaggauucaggaaggaggcca

SEQ ID NO: 2355 - DNA, 23 bp, Artificial Sequence
  Description of Artificial Sequence: Synthetic oligonucleotide
  Description of Combined DNA/RNA Molecule: Synthetic oligonucleotide
uggutuacauuacauagaaucau

SEQ ID NO: 2356 - RNA, 23 nt, Artificial Sequence
  Description of Artificial Sequence: Synthetic oligonucleotide
ucauaaacaaagcaccaaccagc

SEQ ID NO: 2357 - RNA, 23 nt, Artificial Sequence
  Description of Artificial Sequence: Synthetic oligonucleotide
ugucauacuuggcuguaugagug

SEQ ID NO: 2358 - DNA, 23 bp, Artificial Sequence
  Description of Artificial Sequence: Synthetic oligonucleotide
  Description of Combined DNA/RNA Molecule: Synthetic oligonucleotide
ugucauacuuggcuguaugagug

SEQ ID NO: 2359 - DNA, 23 bp, Artificial Sequence
  Description of Artificial Sequence: Synthetic oligonucleotide
  Description of Combined DNA/RNA Molecule: Synthetic oligonucleotide
uuuggctguaugagugucgaugu

SEQ ID NO: 2360 - DNA, 23 bp, Artificial Sequence
  Description of Artificial Sequence: Synthetic oligonucleotide
  Description of Combined DNA/RNA Molecule: Synthetic oligonucleotide
uggaagtccuuaugccagugcuc

SEQ ID NO: 2361 - DNA, 23 bp, Artificial Sequence
  Description of Artificial Sequence: Synthetic oligonucleotide
  Description of Combined DNA/RNA Molecule: Synthetic oligonucleotide
ugagtcaucaaacuccacguuga

SEQ ID NO: 2362 - RNA, 23 nt, Artificial Sequence
  Description of Artificial Sequence: Synthetic oligonucleotide
ugacuauuuuaccugauuugccu

SEQ ID NO: 2363 - DNA, 23 bp, Artificial Sequence
  Description of Artificial Sequence: Synthetic oligonucleotide
  Description of Combined DNA/RNA Molecule: Synthetic oligonucleotide
ugactatuuuaccugauuugccu

SEQ ID NO: 2364 - RNA, 23 nt, Artificial Sequence
  Description of Artificial Sequence: Synthetic oligonucleotide
uacaucaacaacuuucugaaggc

SEQ ID NO: 2365 - DNA, 23 bp, Artificial Sequence
  Description of Artificial Sequence: Synthetic oligonucleotide
  Description of Combined DNA/RNA Molecule: Synthetic oligonucleotide
uacatcaacaacuuucugaaggc

SEQ ID NO: 2366 - DNA, 23 bp, Artificial Sequence
  Description of Artificial Sequence: Synthetic oligonucleotide
  Description of Combined DNA/RNA Molecule: Synthetic oligonucleotide
uaugactauuuuaccugauuugc

SEQ ID NO: 2367 - RNA, 23 nt, Artificial Sequence
  Description of Artificial Sequence: Synthetic oligonucleotide
ucuauuuuaccugauuugccuua

SEQ ID NO: 2368 - DNA, 23 bp, Artificial Sequence
  Description of Artificial Sequence: Synthetic oligonucleotide
  Description of Combined DNA/RNA Molecule: Synthetic oligonucleotide
uugaagtcagcacucuugcccuu

SEQ ID NO: 2369 - RNA, 23 nt, Artificial Sequence
  Description of Artificial Sequence: Synthetic oligonucleotide
uaaaaaauaccuagaacggccag

SEQ ID NO: 2370 - RNA, 23 nt, Artificial Sequence
  Description of Artificial Sequence: Synthetic oligonucleotide
uaacaacuuucugaaggcccggu

SEQ ID NO: 2371 - RNA, 23 nt, Artificial Sequence
  Description of Artificial Sequence: Synthetic oligonucleotide
uacuauuuuaccugauuugccuu

SEQ ID NO: 2372 - RNA, 23 nt, Artificial Sequence
  Description of Artificial Sequence: Synthetic oligonucleotide
ugaccauuguugaggauccucag

SEQ ID NO: 2373 - DNA, 23 bp, Artificial Sequence
  Description of Artificial Sequence: Synthetic oligonucleotide
  Description of Combined DNA/RNA Molecule: Synthetic oligonucleotide
ugaccatuguugaggauccucag

SEQ ID NO: 2374 - DNA, 23 bp, Artificial Sequence
  Description of Artificial Sequence: Synthetic oligonucleotide
  Description of Combined DNA/RNA Molecule: Synthetic oligonucleotide
uguuccagugaaccaagugaagu

SEQ ID NO: 2375 - DNA, 23 bp, Artificial Sequence
  Description of Artificial Sequence: Synthetic oligonucleotide
  Description of Combined DNA/RNA Molecule: Synthetic oligonucleotide
uagutgtccaccaucaguucuuc

SEQ ID NO: 2376 - RNA, 23 nt, Artificial Sequence
  Description of Artificial Sequence: Synthetic oligonucleotide
ucaaagucaagguacuuuauucu

SEQ ID NO: 2377 - DNA, 23 bp, Artificial Sequence
  Description of Artificial Sequence: Synthetic oligonucleotide
  Description of Combined DNA/RNA Molecule: Synthetic oligonucleotide
ucaaagtcaagguacuuuauucu

SEQ ID NO: 2378 - RNA, 23 nt, Artificial Sequence
  Description of Artificial Sequence: Synthetic oligonucleotide
uccuacaugcugugaacaaaguc

SEQ ID NO: 2379 - DNA, 23 bp, Artificial Sequence
  Description of Artificial Sequence: Synthetic oligonucleotide
  Description of Combined DNA/RNA Molecule: Synthetic oligonucleotide
uccuacaugcugugaacaaaguc

SEQ ID NO: 2380 - DNA, 23 bp, Artificial Sequence
  Description of Artificial Sequence: Synthetic oligonucleotide
  Description of Combined DNA/RNA Molecule: Synthetic oligonucleotide
ucaaggtacuuuauucuuauuuc

SEQ ID NO: 2381 - DNA, 23 bp, Artificial Sequence
  Description of Artificial Sequence: Synthetic oligonucleotide
  Description of Combined DNA/RNA Molecule: Synthetic oligonucleotide
uugugutacagaaaaacuacuac

SEQ ID NO: 2382 - RNA, 23 nt, Artificial Sequence
  Description of Artificial Sequence: Synthetic oligonucleotide
ucagggaagggucauacuuggcu

SEQ ID NO: 2383 - DNA, 23 bp, Artificial Sequence
  Description of Artificial Sequence: Synthetic oligonucleotide
  Description of Combined DNA/RNA Molecule: Synthetic oligonucleotide
uugctatggauuugcacucaacc

SEQ ID NO: 2384 - RNA, 23 nt, Artificial Sequence
  Description of Artificial Sequence: Synthetic oligonucleotide
uucaacaacuuucugaaggcccg

SEQ ID NO: 2385 - DNA, 23 bp, Artificial Sequence
  Description of Artificial Sequence: Synthetic oligonucleotide
  Description of Combined DNA/RNA Molecule: Synthetic oligonucleotide
uugaccauuguugaggauccuca

SEQ ID NO: 2386 - DNA, 23 bp, Artificial Sequence
  Description of Artificial Sequence: Synthetic oligonucleotide
  Description of Combined DNA/RNA Molecule: Synthetic oligonucleotide
ucuctgtaucacaacucuaauua

SEQ ID NO: 2387 - DNA, 23 bp, Artificial Sequence
  Description of Artificial Sequence: Synthetic oligonucleotide
  Description of Combined DNA/RNA Molecule: Synthetic oligonucleotide
uagucatcaaacuccacguugaa

SEQ ID NO: 2388 - DNA, 23 bp, Artificial Sequence
  Description of Artificial Sequence: Synthetic oligonucleotide
  Description of Combined DNA/RNA Molecule: Synthetic oligonucleotide
uauctctguaauucaaaagucau

SEQ ID NO: 2389 - RNA, 23 nt, Artificial Sequence
  Description of Artificial Sequence: Synthetic oligonucleotide
uaccauuguugaggauccucagg

SEQ ID NO: 2390 - DNA, 23 bp, Artificial Sequence
  Description of Artificial Sequence: Synthetic oligonucleotide
  Description of Combined DNA/RNA Molecule: Synthetic oligonucleotide
uucctgagagucaucaaacucca

SEQ ID NO: 2391 - DNA, 23 bp, Artificial Sequence
  Description of Artificial Sequence: Synthetic oligonucleotide
  Description of Combined DNA/RNA Molecule: Synthetic oligonucleotide
uuactutccuauguuuuaaaagc

SEQ ID NO: 2392 - RNA, 23 nt, Artificial Sequence
  Description of Artificial Sequence: Synthetic oligonucleotide
ucagaaaaacuacuaccauaaac

SEQ ID NO: 2393 - RNA, 23 nt, Artificial Sequence
  Description of Artificial Sequence: Synthetic oligonucleotide
uccagugaaccaagugaaguucu

SEQ ID NO: 2394 - DNA, 23 bp, Artificial Sequence
  Description of Artificial Sequence: Synthetic oligonucleotide
  Description of Combined DNA/RNA Molecule: Synthetic oligonucleotide
uugccutaacuagcucaauuuau

SEQ ID NO: 2395 - RNA, 23 nt, Artificial Sequence
  Description of Artificial Sequence: Synthetic oligonucleotide
uaaacuacuaccauaaacaaagc

SEQ ID NO: 2396 - DNA, 23 bp, Artificial Sequence
  Description of Artificial Sequence: Synthetic oligonucleotide
  Description of Combined DNA/RNA Molecule: Synthetic oligonucleotide
uaaacuacuaccauaaacaaagc

SEQ ID NO: 2397 - DNA, 23 bp, Artificial Sequence
  Description of Artificial Sequence: Synthetic oligonucleotide
  Description of Combined DNA/RNA Molecule: Synthetic oligonucleotide
uaagtcagcacucuugcccuuug

SEQ ID NO: 2398 - RNA, 23 nt, Artificial Sequence
  Description of Artificial Sequence: Synthetic oligonucleotide
uccugagagucaucaaacuccac

SEQ ID NO: 2399 - RNA, 23 nt, Artificial Sequence
  Description of Artificial Sequence: Synthetic oligonucleotide
ucaacaacuuucugaaggcccgg

SEQ ID NO: 2400 - DNA, 23 bp, Artificial Sequence
  Description of Artificial Sequence: Synthetic oligonucleotide
  Description of Combined DNA/RNA Molecule: Synthetic oligonucleotide
uagugaagucagcacucuugccc

SEQ ID NO: 2401 - DNA, 23 bp, Artificial Sequence
  Description of Artificial Sequence: Synthetic oligonucleotide
  Description of Combined DNA/RNA Molecule: Synthetic oligonucleotide
uuugcctguucuucaguggcuga

SEQ ID NO: 2402 - RNA, 23 nt, Artificial Sequence
  Description of Artificial Sequence: Synthetic oligonucleotide
ugcccuuuguuuuaauggaaucc

SEQ ID NO: 2403 - DNA, 23 bp, Artificial Sequence
  Description of Artificial Sequence: Synthetic oligonucleotide
  Description of Combined DNA/RNA Molecule: Synthetic oligonucleotide
ugcccutuguuuuaauggaaucc

SEQ ID NO: 2404 - DNA, 23 bp, Artificial Sequence
  Description of Artificial Sequence: Synthetic oligonucleotide
  Description of Combined DNA/RNA Molecule: Synthetic oligonucleotide
ucugtgtuacagaaaaacuacua

SEQ ID NO: 2405 - RNA, 23 nt, Artificial Sequence
  Description of Artificial Sequence: Synthetic oligonucleotide
uccaaccuucaaaaaaauaccua

SEQ ID NO: 2406 - RNA, 23 nt, Artificial Sequence
  Description of Artificial Sequence: Synthetic oligonucleotide
uccgaagauucauuauuuggaua

SEQ ID NO: 2407 - DNA, 23 bp, Artificial Sequence
  Description of Artificial Sequence: Synthetic oligonucleotide
  Description of Combined DNA/RNA Molecule: Synthetic oligonucleotide
ucautctacuuuccuauguuuua

SEQ ID NO: 2408 - DNA, 23 bp, Artificial Sequence
  Description of Artificial Sequence: Synthetic oligonucleotide
  Description of Combined DNA/RNA Molecule: Synthetic oligonucleotide
uugctutguccugagagucauca

SEQ ID NO: 2409 - RNA, 23 nt, Artificial Sequence
  Description of Artificial Sequence: Synthetic oligonucleotide
ucugauuugccuuaacuagcuca

SEQ ID NO: 2410 - DNA, 23 bp, Artificial Sequence
  Description of Artificial Sequence: Synthetic oligonucleotide
  Description of Combined DNA/RNA Molecule: Synthetic oligonucleotide
ucautgtugaggauccucaggga

SEQ ID NO: 2411 - RNA, 23 nt, Artificial Sequence
  Description of Artificial Sequence: Synthetic oligonucleotide
uccauaaacaaagcaccaaccag

SEQ ID NO: 2412 - RNA, 23 nt, Artificial Sequence
  Description of Artificial Sequence: Synthetic oligonucleotide
ucaaccuucaaaaaaauaccuag

SEQ ID NO: 2413 - RNA, 23 nt, Artificial Sequence
  Description of Artificial Sequence: Synthetic oligonucleotide
ugggaaacacccgaagauucauu

SEQ ID NO: 2414 - DNA, 23 bp, Artificial Sequence
  Description of Artificial Sequence: Synthetic oligonucleotide
  Description of Combined DNA/RNA Molecule: Synthetic oligonucleotide
ugggaaacacccgaagauucauu

SEQ ID NO: 2415 - RNA, 23 nt, Artificial Sequence
  Description of Artificial Sequence: Synthetic oligonucleotide
uguguuacagaaaaacuacuacc

SEQ ID NO: 2416 - DNA, 23 bp, Artificial Sequence
  Description of Artificial Sequence: Synthetic oligonucleotide
  Description of Combined DNA/RNA Molecule: Synthetic oligonucleotide
ugugtuacagaaaaacuacuacc

SEQ ID NO: 2417 - DNA, 23 bp, Artificial Sequence
  Description of Artificial Sequence: Synthetic oligonucleotide
  Description of Combined DNA/RNA Molecule: Synthetic oligonucleotide
uugucctgagagucaucaaacuc

SEQ ID NO: 2418 - DNA, 23 bp, Artificial Sequence
  Description of Artificial Sequence: Synthetic oligonucleotide
  Description of Combined DNA/RNA Molecule: Synthetic oligonucleotide
ugaaacacccgaagauucauuau

SEQ ID NO: 2419 - RNA, 23 nt, Artificial Sequence
  Description of Artificial Sequence: Synthetic oligonucleotide
uacccgaagauucauuauuugga

SEQ ID NO: 2420 - RNA, 23 nt, Artificial Sequence
  Description of Artificial Sequence: Synthetic oligonucleotide
ucccuacaugcugugaacaaagu

SEQ ID NO: 2421 - DNA, 23 bp, Artificial Sequence
  Description of Artificial Sequence: Synthetic oligonucleotide
  Description of Combined DNA/RNA Molecule: Synthetic oligonucleotide
uaugggtuccuugagcacaaucc

SEQ ID NO: 2422 - RNA, 23 nt, Artificial Sequence
  Description of Artificial Sequence: Synthetic oligonucleotide
uaccauaaacaaagcaccaacca

SEQ ID NO: 2423 - RNA, 23 nt, Artificial Sequence
  Description of Artificial Sequence: Synthetic oligonucleotide
uagggaaacacccgaagauucau

SEQ ID NO: 2424 - DNA, 23 bp, Artificial Sequence
  Description of Artificial Sequence: Synthetic oligonucleotide
  Description of Combined DNA/RNA Molecule: Synthetic oligonucleotide
uguuacagaaaaacuacuaccau

SEQ ID NO: 2425 - RNA, 23 nt, Artificial Sequence
  Description of Artificial Sequence: Synthetic oligonucleotide
uagcuuugauuugccuguucuuc

SEQ ID NO: 2426 - DNA, 23 bp, Artificial Sequence
  Description of Artificial Sequence: Synthetic oligonucleotide
  Description of Combined DNA/RNA Molecule: Synthetic oligonucleotide
uagctutgauuugccuguucuuc

SEQ ID NO: 2427 - RNA, 23 nt, Artificial Sequence
  Description of Artificial Sequence: Synthetic oligonucleotide
ucauagaaucaugacuauuuuac

SEQ ID NO: 2428 - RNA, 23 nt, Artificial Sequence
  Description of Artificial Sequence: Synthetic oligonucleotide
uaaauaccuagaacggccagucc

SEQ ID NO: 2429 - DNA, 23 bp, Artificial Sequence
  Description of Artificial Sequence: Synthetic oligonucleotide
  Description of Combined DNA/RNA Molecule: Synthetic oligonucleotide
uauugutgaggauccucagggaa

SEQ ID NO: 2430 - RNA, 23 nt, Artificial Sequence
  Description of Artificial Sequence: Synthetic oligonucleotide
uuaaacaaagcaccaaccagcca

SEQ ID NO: 2431 - DNA, 23 bp, Artificial Sequence
  Description of Artificial Sequence: Synthetic oligonucleotide
  Description of Combined DNA/RNA Molecule: Synthetic oligonucleotide
uagcacaucaacaacuuucugaa

SEQ ID NO: 2432 - RNA, 23 nt, Artificial Sequence
  Description of Artificial Sequence: Synthetic oligonucleotide
uccacgaggaucgaaguuaguga

SEQ ID NO: 2433 - RNA, 23 nt, Artificial Sequence
  Description of Artificial Sequence: Synthetic oligonucleotide
ucaucaacaacuuucugaaggcc

SEQ ID NO: 2434 - DNA, 23 bp, Artificial Sequence
  Description of Artificial Sequence: Synthetic oligonucleotide
  Description of Combined DNA/RNA Molecule: Synthetic oligonucleotide
uagucctuaugccagugcucagg

SEQ ID NO: 2435 - DNA, 23 bp, Artificial Sequence
  Description of Artificial Sequence: Synthetic oligonucleotide
  Description of Combined DNA/RNA Molecule: Synthetic oligonucleotide
uacctgauuugccuuaacuagcu

SEQ ID NO: 2436 - RNA, 23 nt, Artificial Sequence
  Description of Artificial Sequence: Synthetic oligonucleotide
uccauuguugaggauccucaggg

SEQ ID NO: 2437 - RNA, 23 nt, Artificial Sequence
  Description of Artificial Sequence: Synthetic oligonucleotide
ugaaaaacuacuaccauaaacaa

SEQ ID NO: 2438 - DNA, 23 bp, Artificial Sequence
  Description of Artificial Sequence: Synthetic oligonucleotide
  Description of Combined DNA/RNA Molecule: Synthetic oligonucleotide
uugagcacaauccaggucacaca

SEQ ID NO: 2439 - DNA, 23 bp, Artificial Sequence
  Description of Artificial Sequence: Synthetic oligonucleotide
  Description of Combined DNA/RNA Molecule: Synthetic oligonucleotide
uggctgtaugagugucgauguca

SEQ ID NO: 2440 - DNA, 23 bp, Artificial Sequence
  Description of Artificial Sequence: Synthetic oligonucleotide
  Description of Combined DNA/RNA Molecule: Synthetic oligonucleotide
uugggutccuugagcacaaucca

SEQ ID NO: 2441 - DNA, 23 bp, Artificial Sequence
  Description of Artificial Sequence: Synthetic oligonucleotide
  Description of Combined DNA/RNA Molecule: Synthetic oligonucleotide
uggucatacuuggcuguaugagu

SEQ ID NO: 2442 - RNA, 23 nt, Artificial Sequence
  Description of Artificial Sequence: Synthetic oligonucleotide
uauagaaucaugacuauuuuacc

SEQ ID NO: 2443 - DNA, 23 bp, Artificial Sequence
  Description of Artificial Sequence: Synthetic oligonucleotide
  Description of Combined DNA/RNA Molecule: Synthetic oligonucleotide
uauagaaucaugacuauuuuacc

SEQ ID NO: 2444 - RNA, 23 nt, Artificial Sequence
  Description of Artificial Sequence: Synthetic oligonucleotide
ucugauggguuccuugagcacaa

SEQ ID NO: 2445 - DNA, 23 bp, Artificial Sequence
  Description of Artificial Sequence: Synthetic oligonucleotide
  Description of Combined DNA/RNA Molecule: Synthetic oligonucleotide
uuguccaccaucaguucuucggg

SEQ ID NO: 2446 - DNA, 23 bp, Artificial Sequence
  Description of Artificial Sequence: Synthetic oligonucleotide
  Description of Combined DNA/RNA Molecule: Synthetic oligonucleotide
uucuagtcuucacauuuuauuag

SEQ ID NO: 2447 - RNA, 23 nt, Artificial Sequence
  Description of Artificial Sequence: Synthetic oligonucleotide
uaaacaaagcaccaaccagccac

SEQ ID NO: 2448 - RNA, 23 nt, Artificial Sequence
  Description of Artificial Sequence: Synthetic oligonucleotide
uacccuacaugcugugaacaaag

SEQ ID NO: 2449 - DNA, 23 bp, Artificial Sequence
  Description of Artificial Sequence: Synthetic oligonucleotide
  Description of Combined DNA/RNA Molecule: Synthetic oligonucleotide
uaugggaccaucuuauuugaagg

SEQ ID NO: 2450 - RNA, 23 nt, Artificial Sequence
  Description of Artificial Sequence: Synthetic oligonucleotide
ucuacuuuccuauguuuuaaaag

SEQ ID NO: 2451 - RNA, 23 nt, Artificial Sequence
  Description of Artificial Sequence: Synthetic oligonucleotide
uaaaacuacuaccauaaacaaag

SEQ ID NO: 2452 - DNA, 23 bp, Artificial Sequence
  Description of Artificial Sequence: Synthetic oligonucleotide
  Description of Combined DNA/RNA Molecule: Synthetic oligonucleotide
uaaaactacuaccauaaacaaag

SEQ ID NO: 2453 - RNA, 23 nt, Artificial Sequence
  Description of Artificial Sequence: Synthetic oligonucleotide
uccugauuugccuuaacuagcuc

SEQ ID NO: 2454 - RNA, 23 nt, Artificial Sequence
  Description of Artificial Sequence: Synthetic oligonucleotide
uuagaaucaugacuauuuuaccu

SEQ ID NO: 2455 - DNA, 23 bp, Artificial Sequence
  Description of Artificial Sequence: Synthetic oligonucleotide
  Description of Combined DNA/RNA Molecule: Synthetic oligonucleotide
uuagaatcaugacuauuuuaccu

SEQ ID NO: 2456 - RNA, 23 nt, Artificial Sequence
  Description of Artificial Sequence: Synthetic oligonucleotide
uaauaccuagaacggccagucca

SEQ ID NO: 2457 - DNA, 23 bp, Artificial Sequence
  Description of Artificial Sequence: Synthetic oligonucleotide
  Description of Combined DNA/RNA Molecule: Synthetic oligonucleotide
ugcctgtucuucaguggcugagc

SEQ ID NO: 2458 - DNA, 23 bp, Artificial Sequence
  Description of Artificial Sequence: Synthetic oligonucleotide
  Description of Combined DNA/RNA Molecule: Synthetic oligonucleotide
uaauccaggucacacauuccaga

SEQ ID NO: 2459 - RNA, 23 nt, Artificial Sequence
  Description of Artificial Sequence: Synthetic oligonucleotide
ucaucacccuacaugcugugaac

SEQ ID NO: 2460 - DNA, 23 bp, Artificial Sequence
  Description of Artificial Sequence: Synthetic oligonucleotide
  Description of Combined DNA/RNA Molecule: Synthetic oligonucleotide
uaagggtcauacuuggcuguaug

SEQ ID NO: 2461 - RNA, 23 nt, Artificial Sequence
  Description of Artificial Sequence: Synthetic oligonucleotide
uguccuuaugccagugcucaggu

SEQ ID NO: 2462 - DNA, 23 bp, Artificial Sequence
  Description of Artificial Sequence: Synthetic oligonucleotide
  Description of Combined DNA/RNA Molecule: Synthetic oligonucleotide
uguccutaugccagugcucaggu

SEQ ID NO: 2463 - DNA, 23 bp, Artificial Sequence
  Description of Artificial Sequence: Synthetic oligonucleotide
  Description of Combined DNA/RNA Molecule: Synthetic oligonucleotide
ucgctgauggguuccuugagcac

SEQ ID NO: 2464 - DNA, 23 bp, Artificial Sequence
  Description of Artificial Sequence: Synthetic oligonucleotide
  Description of Combined DNA/RNA Molecule: Synthetic oligonucleotide
uccaggtcacacauuccagaaga

SEQ ID NO: 2465 - RNA, 23 nt, Artificial Sequence
  Description of Artificial Sequence: Synthetic oligonucleotide
ugccuuaacuagcucaauuuauc

SEQ ID NO: 2466 - DNA, 23 bp, Artificial Sequence
  Description of Artificial Sequence: Synthetic oligonucleotide
  Description of Combined DNA/RNA Molecule: Synthetic oligonucleotide
uugccaaccuucaaaaaaauacc

SEQ ID NO: 2467 - RNA, 23 nt, Artificial Sequence
  Description of Artificial Sequence: Synthetic oligonucleotide
ucuguaucacaacucuaauuaua

SEQ ID NO: 2468 - DNA, 23 bp, Artificial Sequence
  Description of Artificial Sequence: Synthetic oligonucleotide
  Description of Combined DNA/RNA Molecule: Synthetic oligonucleotide
ucugtatcacaacucuaauuaua

SEQ ID NO: 2469 - RNA, 23 nt, Artificial Sequence
  Description of Artificial Sequence: Synthetic oligonucleotide
ucugcuuuguccugagagucauc

SEQ ID NO: 2470 - DNA, 23 bp, Artificial Sequence
  Description of Artificial Sequence: Synthetic oligonucleotide
  Description of Combined DNA/RNA Molecule: Synthetic oligonucleotide
ucugcutuguccugagagucauc

SEQ ID NO: 2471 - DNA, 23 bp, Artificial Sequence
  Description of Artificial Sequence: Synthetic oligonucleotide
  Description of Combined DNA/RNA Molecule: Synthetic oligonucleotide
ugggtcauacuuggcuguaugag

SEQ ID NO: 2472 - RNA, 23 nt, Artificial Sequence
  Description of Artificial Sequence: Synthetic oligonucleotide
ugccaaccuucaaaaaaauaccu

SEQ ID NO: 2473 - DNA, 23 bp, Artificial Sequence
  Description of Artificial Sequence: Synthetic oligonucleotide
  Description of Combined DNA/RNA Molecule: Synthetic oligonucleotide
uucatcacccuacaugcugugaa

SEQ ID NO: 2474 - DNA, 23 bp, Artificial Sequence
  Description of Artificial Sequence: Synthetic oligonucleotide
  Description of Combined DNA/RNA Molecule: Synthetic oligonucleotide
uguatcacaacucuaauuauaac

SEQ ID NO: 2475 - DNA, 23 bp, Artificial Sequence
  Description of Artificial Sequence: Synthetic oligonucleotide
  Description of Combined DNA/RNA Molecule: Synthetic oligonucleotide
uugcacagcuuucccaaaauccc

SEQ ID NO: 2476 - DNA, 23 bp, Artificial Sequence
  Description of Artificial Sequence: Synthetic oligonucleotide
  Description of Combined DNA/RNA Molecule: Synthetic oligonucleotide
ucactctugcccuuuguuuuaau

SEQ ID NO: 2477 - RNA, 23 nt, Artificial Sequence
  Description of Artificial Sequence: Synthetic oligonucleotide
ugacgcugauggguuccuugagc

SEQ ID NO: 2478 - DNA, 23 bp, Artificial Sequence
  Description of Artificial Sequence: Synthetic oligonucleotide
  Description of Combined DNA/RNA Molecule: Synthetic oligonucleotide
ugacgctgauggguuccuugagc

SEQ ID NO: 2479 - RNA, 23 nt, Artificial Sequence
  Description of Artificial Sequence: Synthetic oligonucleotide
ugcacaucaacaacuuucugaag

SEQ ID NO: 2480 - DNA, 23 bp, Artificial Sequence
  Description of Artificial Sequence: Synthetic oligonucleotide
  Description of Combined DNA/RNA Molecule: Synthetic oligonucleotide
ugcacatcaacaacuuucugaag

SEQ ID NO: 2481 - RNA, 23 nt, Artificial Sequence
  Description of Artificial Sequence: Synthetic oligonucleotide
ucccgaagauucauuauuuggau

SEQ ID NO: 2482 - DNA, 23 bp, Artificial Sequence
  Description of Artificial Sequence: Synthetic oligonucleotide
  Description of Combined DNA/RNA Molecule: Synthetic oligonucleotide
uugctcaucacccuacaugcugu

SEQ ID NO: 2483 - RNA, 23 nt, Artificial Sequence
  Description of Artificial Sequence: Synthetic oligonucleotide
ucuuaacuagcucaauuuaucuu

SEQ ID NO: 2484 - RNA, 23 nt, Artificial Sequence
  Description of Artificial Sequence: Synthetic oligonucleotide
uccuguucuucaguggcugagcu

SEQ ID NO: 2485 - DNA, 23 bp, Artificial Sequence
  Description of Artificial Sequence: Synthetic oligonucleotide
  Description of Combined DNA/RNA Molecule: Synthetic oligonucleotide
uccugutcuucaguggcugagcu

SEQ ID NO: 2486 - DNA, 23 bp, Artificial Sequence
  Description of Artificial Sequence: Synthetic oligonucleotide
  Description of Combined DNA/RNA Molecule: Synthetic oligonucleotide
ugcucatcacccuacaugcugug

SEQ ID NO: 2487 - RNA, 23 nt, Artificial Sequence
  Description of Artificial Sequence: Synthetic oligonucleotide
uaacacccgaagauucauuauuu

SEQ ID NO: 2488 - DNA, 23 bp, Artificial Sequence
  Description of Artificial Sequence: Synthetic oligonucleotide
  Description of Combined DNA/RNA Molecule: Synthetic oligonucleotide
uugctgacgcugauggguuccuu

SEQ ID NO: 2489 - RNA, 23 nt, Artificial Sequence
  Description of Artificial Sequence: Synthetic oligonucleotide
ucacccuacaugcugugaacaaa

SEQ ID NO: 2490 - DNA, 23 bp, Artificial Sequence
  Description of Artificial Sequence: Synthetic oligonucleotide
  Description of Combined DNA/RNA Molecule: Synthetic oligonucleotide
uagcactcuugcccuuuguuuua

SEQ ID NO: 2491 - RNA, 23 nt, Artificial Sequence
  Description of Artificial Sequence: Synthetic oligonucleotide
uagcacaauccaggucacacauu

SEQ ID NO: 2492 - DNA, 23 bp, Artificial Sequence
  Description of Artificial Sequence: Synthetic oligonucleotide
  Description of Combined DNA/RNA Molecule: Synthetic oligonucleotide
uagcacaauccaggucacacauu

SEQ ID NO: 2493 - RNA, 23 nt, Artificial Sequence
  Description of Artificial Sequence: Synthetic oligonucleotide
uacacccgaagauucauuauuug

SEQ ID NO: 2494 - RNA, 23 nt, Artificial Sequence
  Description of Artificial Sequence: Synthetic oligonucleotide
ucugccaaccuucaaaaaaauac

SEQ ID NO: 2495 - DNA, 23 bp, Artificial Sequence
  Description of Artificial Sequence: Synthetic oligonucleotide
  Description of Combined DNA/RNA Molecule: Synthetic oligonucleotide
ucugccaaccuucaaaaaaauac

SEQ ID NO: 2496 - DNA, 23 bp, Artificial Sequence
  Description of Artificial Sequence: Synthetic oligonucleotide
  Description of Combined DNA/RNA Molecule: Synthetic oligonucleotide
ugcugatggguuccuugagcaca

SEQ ID NO: 2497 - RNA, 23 nt, Artificial Sequence
  Description of Artificial Sequence: Synthetic oligonucleotide
uaaacacccgaagauucauuauu

SEQ ID NO: 2498 - RNA, 23 nt, Artificial Sequence
  Description of Artificial Sequence: Synthetic oligonucleotide
uacaaagcaccaaccagccacag

SEQ ID NO: 2499 - RNA, 23 nt, Artificial Sequence
  Description of Artificial Sequence: Synthetic oligonucleotide
ucugacgcugauggguuccuuga

SEQ ID NO: 2500 - DNA, 23 bp, Artificial Sequence
  Description of Artificial Sequence: Synthetic oligonucleotide
  Description of Combined DNA/RNA Molecule: Synthetic oligonucleotide
uacucutgcccuuuguuuuaaug

SEQ ID NO: 2501 - DNA, 23 bp, Artificial Sequence
  Description of Artificial Sequence: Synthetic oligonucleotide
  Description of Combined DNA/RNA Molecule: Synthetic oligonucleotide
uaaagcaccaaccagccacagca

SEQ ID NO: 2502 - DNA, 23 bp, Artificial Sequence
  Description of Artificial Sequence: Synthetic oligonucleotide
  Description of Combined DNA/RNA Molecule: Synthetic oligonucleotide
uguucutcaguggcugagcuggg

SEQ ID NO: 2503 - RNA, 23 nt, Artificial Sequence
  Description of Artificial Sequence: Synthetic oligonucleotide
ucacccgaagauucauuauuugg

SEQ ID NO: 2504 - RNA, 23 nt, Artificial Sequence
  Description of Artificial Sequence: Synthetic oligonucleotide
uacaauccaggucacacauucca

SEQ ID NO: 2505 - DNA, 23 bp, Artificial Sequence
  Description of Artificial Sequence: Synthetic oligonucleotide
  Description of Combined DNA/RNA Molecule: Synthetic oligonucleotide
uagugctcaucacccuacaugcu

SEQ ID NO: 2506 - DNA, 23 bp, Artificial Sequence
  Description of Artificial Sequence: Synthetic oligonucleotide
  Description of Combined DNA/RNA Molecule: Synthetic oligonucleotide
uauacctagaacggccaguccau

SEQ ID NO: 2507 - RNA, 23 nt, Artificial Sequence
  Description of Artificial Sequence: Synthetic oligonucleotide
uccuuaacuagcucaauuuaucu

SEQ ID NO: 2508 - RNA, 23 nt, Artificial Sequence
  Description of Artificial Sequence: Synthetic oligonucleotide
uccagcacaucaacaacuuucug

SEQ ID NO: 2509 - DNA, 23 bp, Artificial Sequence
  Description of Artificial Sequence: Synthetic oligonucleotide
  Description of Combined DNA/RNA Molecule: Synthetic oligonucleotide
uccagcacaucaacaacuuucug

SEQ ID NO: 2510 - RNA, 23 nt, Artificial Sequence
  Description of Artificial Sequence: Synthetic oligonucleotide
ucagcacucuugcccuuuguuuu

SEQ ID NO: 2511 - DNA, 23 bp, Artificial Sequence
  Description of Artificial Sequence: Synthetic oligonucleotide
  Description of Combined DNA/RNA Molecule: Synthetic oligonucleotide
uucctuaugccagugcucagguc

SEQ ID NO: 2512 - DNA, 23 bp, Artificial Sequence
  Description of Artificial Sequence: Synthetic oligonucleotide
  Description of Combined DNA/RNA Molecule: Synthetic oligonucleotide
ugcgccaguuguccaccaucagu

SEQ ID NO: 2513 - DNA, 23 bp, Artificial Sequence
  Description of Artificial Sequence: Synthetic oligonucleotide
  Description of Combined DNA/RNA Molecule: Synthetic oligonucleotide
uucagcacucuugcccuuuguuu

SEQ ID NO: 2514 - DNA, 23 bp, Artificial Sequence
  Description of Artificial Sequence: Synthetic oligonucleotide
  Description of Combined DNA/RNA Molecule: Synthetic oligonucleotide
uaugccagugcucagguccguug

SEQ ID NO: 2515 - DNA, 23 bp, Artificial Sequence
  Description of Artificial Sequence: Synthetic oligonucleotide
  Description of Combined DNA/RNA Molecule: Synthetic oligonucleotide
uguugctgcacagcuuucccaaa

SEQ ID NO: 2516 - DNA, 23 bp, Artificial Sequence
  Description of Artificial Sequence: Synthetic oligonucleotide
  Description of Combined DNA/RNA Molecule: Synthetic oligonucleotide
ugcugctgacgcugauggguucc

SEQ ID NO: 2517 - DNA, 23 bp, Artificial Sequence
  Description of Artificial Sequence: Synthetic oligonucleotide
  Description of Combined DNA/RNA Molecule: Synthetic oligonucleotide
uugutctucaguggcugagcugg

SEQ ID NO: 2518 - DNA, 23 bp, Artificial Sequence
  Description of Artificial Sequence: Synthetic oligonucleotide
  Description of Combined DNA/RNA Molecule: Synthetic oligonucleotide
uagcgctgccaaccuucaaaaaa

SEQ ID NO: 2519 - DNA, 23 bp, Artificial Sequence
  Description of Artificial Sequence: Synthetic oligonucleotide
  Description of Combined DNA/RNA Molecule: Synthetic oligonucleotide
ugcutcagggaagggucauacuu

SEQ ID NO: 2520 - DNA, 23 bp, Artificial Sequence
  Description of Artificial Sequence: Synthetic oligonucleotide
  Description of Combined DNA/RNA Molecule: Synthetic oligonucleotide
uuggtcagugagccuggguaggu

SEQ ID NO: 2521 - DNA, 23 bp, Artificial Sequence
  Description of Artificial Sequence: Synthetic oligonucleotide
  Description of Combined DNA/RNA Molecule: Synthetic oligonucleotide
ugguggtcagugagccuggguag

SEQ ID NO: 2522 - RNA, 23 nt, Artificial Sequence
  Description of Artificial Sequence: Synthetic oligonucleotide
uaccuagaacggccaguccauca

SEQ ID NO: 2523 - RNA, 23 nt, Artificial Sequence
  Description of Artificial Sequence: Synthetic oligonucleotide
uccuuaugccagugcucaggucc

SEQ ID NO: 2524 - RNA, 23 nt, Artificial Sequence
  Description of Artificial Sequence: Synthetic oligonucleotide
ucucgcugcugacgcugaugggu

SEQ ID NO: 2525 - DNA, 23 bp, Artificial Sequence
  Description of Artificial Sequence: Synthetic oligonucleotide
  Description of Combined DNA/RNA Molecule: Synthetic oligonucleotide
uuaccuagaacggccaguccauc

SEQ ID NO: 2526 - DNA, 23 bp, Artificial Sequence
  Description of Artificial Sequence: Synthetic oligonucleotide
  Description of Combined DNA/RNA Molecule: Synthetic oligonucleotide
ugcugcacagcuuucccaaaauc

SEQ ID NO: 2527 - RNA, 23 nt, Artificial Sequence
  Description of Artificial Sequence: Synthetic oligonucleotide
uuagaacggccaguccaucaggu

SEQ ID NO: 2528 - DNA, 23 bp, Artificial Sequence
  Description of Artificial Sequence: Synthetic oligonucleotide
  Description of Combined DNA/RNA Molecule: Synthetic oligonucleotide
ugucagtgagccuggguaggucc

SEQ ID NO: 2529 - DNA, 23 bp, Artificial Sequence
  Description of Artificial Sequence: Synthetic oligonucleotide
  Description of Combined DNA/RNA Molecule: Synthetic oligonucleotide
ucagtgagccuggguagguccag

SEQ ID NO: 2530 - RNA, 23 nt, Artificial Sequence
  Description of Artificial Sequence: Synthetic oligonucleotide
uccuagaacggccaguccaucag

SEQ ID NO: 2531 - DNA, 23 bp, Artificial Sequence
  Description of Artificial Sequence: Synthetic oligonucleotide
  Description of Combined DNA/RNA Molecule: Synthetic oligonucleotide
uggutuagcgcugccaaccuuca

SEQ ID NO: 2532 - RNA, 23 nt, Artificial Sequence
  Description of Artificial Sequence: Synthetic oligonucleotide
ucuagaacggccaguccaucagg

SEQ ID NO: 2533 - RNA, 23 nt, Artificial Sequence
  Description of Artificial Sequence: Synthetic oligonucleotide
uccaguuguccaccaucaguucu

SEQ ID NO: 2534 - DNA, 23 bp, Artificial Sequence
  Description of Artificial Sequence: Synthetic oligonucleotide
  Description of Combined DNA/RNA Molecule: Synthetic oligonucleotide
uccagutguccaccaucaguucu

SEQ ID NO: 2535 - RNA, 23 nt, Artificial Sequence
  Description of Artificial Sequence: Synthetic oligonucleotide
ucaaccagccacagcaguugugu

SEQ ID NO: 2536 - DNA, 23 bp, Artificial Sequence
  Description of Artificial Sequence: Synthetic oligonucleotide
  Description of Combined DNA/RNA Molecule: Synthetic oligonucleotide
ucaaccagccacagcaguugugu

SEQ ID NO: 2537 - DNA, 23 bp, Artificial Sequence
  Description of Artificial Sequence: Synthetic oligonucleotide
  Description of Combined DNA/RNA Molecule: Synthetic oligonucleotide
ugccagtgcucagguccguugug

SEQ ID NO: 2538 - RNA, 23 nt, Artificial Sequence
  Description of Artificial Sequence: Synthetic oligonucleotide
uccaaccagccacagcaguugug

SEQ ID NO: 2539 - DNA, 23 bp, Artificial Sequence
  Description of Artificial Sequence: Synthetic oligonucleotide
  Description of Combined DNA/RNA Molecule: Synthetic oligonucleotide
ugccagtuguccaccaucaguuc

SEQ ID NO: 2540 - RNA, 23 nt, Artificial Sequence
  Description of Artificial Sequence: Synthetic oligonucleotide
ugcaccaaccagccacagcaguu

SEQ ID NO: 2541 - RNA, 23 nt, Artificial Sequence
  Description of Artificial Sequence: Synthetic oligonucleotide
ucuguuuccuaugaucaagcaac

SEQ ID NO: 2542 - RNA, 23 nt, Artificial Sequence
  Description of Artificial Sequence: Synthetic oligonucleotide
gcugacuucacuaacuucgaucc

SEQ ID NO: 2543 - RNA, 23 nt, Artificial Sequence
  Description of Artificial Sequence: Synthetic oligonucleotide
aucaaagcuuccuucaaauaaga

SEQ ID NO: 2544 - RNA, 23 nt, Artificial Sequence
  Description of Artificial Sequence: Synthetic oligonucleotide
aaucaaagcuuccuucaaauaag

SEQ ID NO: 2545 - RNA, 23 nt, Artificial Sequence
  Description of Artificial Sequence: Synthetic oligonucleotide
uagucuguauccaaauaaugaau

SEQ ID NO: 2546 - RNA, 23 nt, Artificial Sequence
  Description of Artificial Sequence: Synthetic oligonucleotide
aaauuccguaaacuuaacuucaa

SEQ ID NO: 2547 - RNA, 23 nt, Artificial Sequence
  Description of Artificial Sequence: Synthetic oligonucleotide
uuuccuaugaucaagcaacuucc

SEQ ID NO: 2548 - RNA, 23 nt, Artificial Sequence
  Description of Artificial Sequence: Synthetic oligonucleotide
cuguuuccuaugaucaagcaacu

SEQ ID NO: 2549 - RNA, 23 nt, Artificial Sequence
  Description of Artificial Sequence: Synthetic oligonucleotide
aaaugcugcuuuuaaaacauagg

SEQ ID NO: 2550 - RNA, 23 nt, Artificial Sequence
  Description of Artificial Sequence: Synthetic oligonucleotide
uccauucagacaauauaucauaa

SEQ ID NO: 2551 - RNA, 23 nt, Artificial Sequence
  Description of Artificial Sequence: Synthetic oligonucleotide
cugacuucacuaacuucgauccu

SEQ ID NO: 2552 - RNA, 23 nt, Artificial Sequence
  Description of Artificial Sequence: Synthetic oligonucleotide
uuccauucagacaauauaucaua

SEQ ID NO: 2553 - RNA, 23 nt, Artificial Sequence
  Description of Artificial Sequence: Synthetic oligonucleotide
agucuguauccaaauaaugaauc

SEQ ID NO: 2554 - RNA, 23 nt, Artificial Sequence
  Description of Artificial Sequence: Synthetic oligonucleotide
caaaucaaagcuuccuucaaaua

SEQ ID NO: 2555 - RNA, 23 nt, Artificial Sequence
  Description of Artificial Sequence: Synthetic oligonucleotide
ccauucagacaauauaucauaac

SEQ ID NO: 2556 - RNA, 23 nt, Artificial Sequence
  Description of Artificial Sequence: Synthetic oligonucleotide
uuccguaaacuuaacuucaaugg

SEQ ID NO: 2557 - RNA, 23 nt, Artificial Sequence
  Description of Artificial Sequence: Synthetic oligonucleotide
gagugcugacuucacuaacuucg

SEQ ID NO: 2558 - RNA, 23 nt, Artificial Sequence
  Description of Artificial Sequence: Synthetic oligonucleotide
caaagcuuccuucaaauaagaug

SEQ ID NO: 2559 - RNA, 23 nt, Artificial Sequence
  Description of Artificial Sequence: Synthetic oligonucleotide
ugaaauuccguaaacuuaacuuc

SEQ ID NO: 2560 - RNA, 23 nt, Artificial Sequence
  Description of Artificial Sequence: Synthetic oligonucleotide
cccugucuguuuccuaugaucaa

SEQ ID NO: 2561 - RNA, 23 nt, Artificial Sequence
  Description of Artificial Sequence: Synthetic oligonucleotide
cuguauccaaauaaugaaucuuc

SEQ ID NO: 2562 - RNA, 23 nt, Artificial Sequence
  Description of Artificial Sequence: Synthetic oligonucleotide
ugcugacuucacuaacuucgauc

SEQ ID NO: 2563 - RNA, 23 nt, Artificial Sequence
  Description of Artificial Sequence: Synthetic oligonucleotide
aagcuuccuucaaauaagauggu

SEQ ID NO: 2564 - RNA, 23 nt, Artificial Sequence
  Description of Artificial Sequence: Synthetic oligonucleotide
gcaaaucaaagcuuccuucaaau

SEQ ID NO: 2565 - RNA, 23 nt, Artificial Sequence
  Description of Artificial Sequence: Synthetic oligonucleotide
aaagcuuccuucaaauaagaugg

SEQ ID NO: 2566 - RNA, 23 nt, Artificial Sequence
  Description of Artificial Sequence: Synthetic oligonucleotide
aaugcugcuuuuaaaacauagga

SEQ ID NO: 2567 - RNA, 23 nt, Artificial Sequence
  Description of Artificial Sequence: Synthetic oligonucleotide
acaggcaaaucaaagcuuccuuc

SEQ ID NO: 2568 - RNA, 23 nt, Artificial Sequence
  Description of Artificial Sequence: Synthetic oligonucleotide
caggcaaaucaaagcuuccuuca

SEQ ID NO: 2569 - RNA, 23 nt, Artificial Sequence
  Description of Artificial Sequence: Synthetic oligonucleotide
ucaaagcuuccuucaaauaagau

SEQ ID NO: 2570 - RNA, 23 nt, Artificial Sequence
  Description of Artificial Sequence: Synthetic oligonucleotide
acuaaaaugcugcuuuuaaaaca

SEQ ID NO: 2571 - RNA, 23 nt, Artificial Sequence
  Description of Artificial Sequence: Synthetic oligonucleotide
auaagaauaaaguaccuugacuu

SEQ ID NO: 2572 - RNA, 23 nt, Artificial Sequence
  Description of Artificial Sequence: Synthetic oligonucleotide
uaagaauaaaguaccuugacuuu

SEQ ID NO: 2573 - RNA, 23 nt, Artificial Sequence
  Description of Artificial Sequence: Synthetic oligonucleotide
cugucuguuuccuaugaucaagc

SEQ ID NO: 2574 - RNA, 23 nt, Artificial Sequence
  Description of Artificial Sequence: Synthetic oligonucleotide
auuccguaaacuuaacuucaaug

SEQ ID NO: 2575 - RNA, 23 nt, Artificial Sequence
  Description of Artificial Sequence: Synthetic oligonucleotide
cuccucuucuggaaugugugacc

SEQ ID NO: 2576 - RNA, 23 nt, Artificial Sequence
  Description of Artificial Sequence: Synthetic oligonucleotide
uguauccaaauaaugaaucuucg

SEQ ID NO: 2577 - RNA, 23 nt, Artificial Sequence
  Description of Artificial Sequence: Synthetic oligonucleotide
ugucuguuuccuaugaucaagca

SEQ ID NO: 2578 - RNA, 23 nt, Artificial Sequence
  Description of Artificial Sequence: Synthetic oligonucleotide
cuguugacaucgacacucauaca

SEQ ID NO: 2579 - RNA, 23 nt, Artificial Sequence
  Description of Artificial Sequence: Synthetic oligonucleotide
uaaaguaccuugacuuuguucac

SEQ ID NO: 2580 - RNA, 23 nt, Artificial Sequence
  Description of Artificial Sequence: Synthetic oligonucleotide
cacagaucuaccuuggugauuug

SEQ ID NO: 2581 - RNA, 23 nt, Artificial Sequence
  Description of Artificial Sequence: Synthetic oligonucleotide
accuggauugugcucaaggaacc

SEQ ID NO: 2582 - RNA, 23 nt, Artificial Sequence
  Description of Artificial Sequence: Synthetic oligonucleotide
gcugcuuuuaaaacauaggaaag

SEQ ID NO: 2583 - RNA, 23 nt, Artificial Sequence
  Description of Artificial Sequence: Synthetic oligonucleotide
agugcugacuucacuaacuucga

SEQ ID NO: 2584 - RNA, 23 nt, Artificial Sequence
  Description of Artificial Sequence: Synthetic oligonucleotide
uugaaauuccguaaacuuaacuu

SEQ ID NO: 2585 - RNA, 23 nt, Artificial Sequence
  Description of Artificial Sequence: Synthetic oligonucleotide
guuaaggcaaaucagguaaaaua

SEQ ID NO: 2586 - RNA, 23 nt, Artificial Sequence
  Description of Artificial Sequence: Synthetic oligonucleotide
ccguucuagguauuuuuuugaag

SEQ ID NO: 2587 - RNA, 23 nt, Artificial Sequence
  Description of Artificial Sequence: Synthetic oligonucleotide
acaagauaaauugagcuaguuaa

SEQ ID NO: 2588 - RNA, 23 nt, Artificial Sequence
  Description of Artificial Sequence: Synthetic oligonucleotide
cuuuagcuaagcacagaucuacc

SEQ ID NO: 2589 - RNA, 23 nt, Artificial Sequence
  Description of Artificial Sequence: Synthetic oligonucleotide
gacuucacuaacuucgauccucg

SEQ ID NO: 2590 - RNA, 23 nt, Artificial Sequence
  Description of Artificial Sequence: Synthetic oligonucleotide
gaaauuccguaaacuuaacuuca

SEQ ID NO: 2591 - RNA, 23 nt, Artificial Sequence
  Description of Artificial Sequence: Synthetic oligonucleotide
ugcugcuuuuaaaacauaggaaa

SEQ ID NO: 2592 - RNA, 23 nt, Artificial Sequence
  Description of Artificial Sequence: Synthetic oligonucleotide
cccuguugacaucgacacucaua

SEQ ID NO: 2593 - RNA, 23 nt, Artificial Sequence
  Description of Artificial Sequence: Synthetic oligonucleotide
acuucacuaacuucgauccucgu

SEQ ID NO: 2594 - RNA, 23 nt, Artificial Sequence
  Description of Artificial Sequence: Synthetic oligonucleotide
uagcuaagcacagaucuaccuug

SEQ ID NO: 2595 - RNA, 23 nt, Artificial Sequence
  Description of Artificial Sequence: Synthetic oligonucleotide
aauaaaguaccuugacuuuguuc

SEQ ID NO: 2596 - RNA, 23 nt, Artificial Sequence
  Description of Artificial Sequence: Synthetic oligonucleotide
cuaaaaugcugcuuuuaaaacau

SEQ ID NO: 2597 - RNA, 23 nt, Artificial Sequence
  Description of Artificial Sequence: Synthetic oligonucleotide
augcugcuuuuaaaacauaggaa

SEQ ID NO: 2598 - RNA, 23 nt, Artificial Sequence
  Description of Artificial Sequence: Synthetic oligonucleotide
agucaugauucuauguaauguaa

SEQ ID NO: 2599 - RNA, 23 nt, Artificial Sequence
  Description of Artificial Sequence: Synthetic oligonucleotide
agagugcugacuucacuaacuuc

SEQ ID NO: 2600 - RNA, 23 nt, Artificial Sequence
  Description of Artificial Sequence: Synthetic oligonucleotide
agcuaagcacagaucuaccuugg

SEQ ID NO: 2601 - RNA, 23 nt, Artificial Sequence
  Description of Artificial Sequence: Synthetic oligonucleotide
uucacuaacuucgauccucgugg

SEQ ID NO: 2602 - RNA, 23 nt, Artificial Sequence
  Description of Artificial Sequence: Synthetic oligonucleotide
cacugaagaacaggcaaaucaaa

SEQ ID NO: 2603 - RNA, 23 nt, Artificial Sequence
  Description of Artificial Sequence: Synthetic oligonucleotide
auaaaguaccuugacuuuguuca

SEQ ID NO: 2604 - RNA, 23 nt, Artificial Sequence
  Description of Artificial Sequence: Synthetic oligonucleotide
gugcuuuguuuaugguaguaguu

SEQ ID NO: 2605 - RNA, 23 nt, Artificial Sequence
  Description of Artificial Sequence: Synthetic oligonucleotide
gucaugauucuauguaauguaaa

SEQ ID NO: 2606 - RNA, 23 nt, Artificial Sequence
  Description of Artificial Sequence: Synthetic oligonucleotide
gccguucuagguauuuuuuugaa

SEQ ID NO: 2607 - RNA, 23 nt, Artificial Sequence
  Description of Artificial Sequence: Synthetic oligonucleotide
cguucuagguauuuuuuugaagg

SEQ ID NO: 2608 - RNA, 23 nt, Artificial Sequence
  Description of Artificial Sequence: Synthetic oligonucleotide
ccuccuuccugaauccuuggauu

SEQ ID NO: 2609 - RNA, 23 nt, Artificial Sequence
  Description of Artificial Sequence: Synthetic oligonucleotide
uugacuaaaaugcugcuuuuaaa

SEQ ID NO: 2610 - RNA, 23 nt, Artificial Sequence
  Description of Artificial Sequence: Synthetic oligonucleotide
agaacaggcaaaucaaagcuucc

SEQ ID NO: 2611 - RNA, 23 nt, Artificial Sequence
  Description of Artificial Sequence: Synthetic oligonucleotide
cuccuuccugaauccuuggauua

SEQ ID NO: 2612 - RNA, 23 nt, Artificial Sequence
  Description of Artificial Sequence: Synthetic oligonucleotide
uuugaugacucucaggacaaagc

SEQ ID NO: 2613 - RNA, 23 nt, Artificial Sequence
  Description of Artificial Sequence: Synthetic oligonucleotide
cguggaguuugaugacucucagg

SEQ ID NO: 2614 - RNA, 23 nt, Artificial Sequence
  Description of Artificial Sequence: Synthetic oligonucleotide
guauccaaauaaugaaucuucgg

SEQ ID NO: 2615 - RNA, 23 nt, Artificial Sequence
  Description of Artificial Sequence: Synthetic oligonucleotide
ccuugacuuuguucacagcaugu

SEQ ID NO: 2616 - RNA, 23 nt, Artificial Sequence
  Description of Artificial Sequence: Synthetic oligonucleotide
acagaucuaccuuggugauuugg

SEQ ID NO: 2617 - RNA, 23 nt, Artificial Sequence
  Description of Artificial Sequence: Synthetic oligonucleotide
uuaugguaguaguuuuucuguaa

SEQ ID NO: 2618 - RNA, 23 nt, Artificial Sequence
  Description of Artificial Sequence: Synthetic oligonucleotide
uaccuugacuuuguucacagcau

SEQ ID NO: 2619 - RNA, 23 nt, Artificial Sequence
  Description of Artificial Sequence: Synthetic oligonucleotide
gaccuggauugugcucaaggaac

SEQ ID NO: 2620 - RNA, 23 nt, Artificial Sequence
  Description of Artificial Sequence: Synthetic oligonucleotide
uugagcuaguuaaggcaaaucag

SEQ ID NO: 2621 - RNA, 23 nt, Artificial Sequence
  Description of Artificial Sequence: Synthetic oligonucleotide
ccacugaagaacaggcaaaucaa

SEQ ID NO: 2622 - RNA, 23 nt, Artificial Sequence
  Description of Artificial Sequence: Synthetic oligonucleotide
acugaagaacaggcaaaucaaag

SEQ ID NO: 2623 - RNA, 23 nt, Artificial Sequence
  Description of Artificial Sequence: Synthetic oligonucleotide
cccuccucuucuggaauguguga

SEQ ID NO: 2624 - RNA, 23 nt, Artificial Sequence
  Description of Artificial Sequence: Synthetic oligonucleotide
augcuuucaacguggaguuugau

SEQ ID NO: 2625 - RNA, 23 nt, Artificial Sequence
  Description of Artificial Sequence: Synthetic oligonucleotide
caugcuuucaacguggaguuuga

SEQ ID NO: 2626 - RNA, 23 nt, Artificial Sequence
  Description of Artificial Sequence: Synthetic oligonucleotide
aucagguaaaauagucaugauuc

SEQ ID NO: 2627 - RNA, 23 nt, Artificial Sequence
  Description of Artificial Sequence: Synthetic oligonucleotide
gucuguauccaaauaaugaaucu

SEQ ID NO: 2628 - RNA, 23 nt, Artificial Sequence
  Description of Artificial Sequence: Synthetic oligonucleotide
uuaaggcaaaucagguaaaauag

SEQ ID NO: 2629 - RNA, 23 nt, Artificial Sequence
  Description of Artificial Sequence: Synthetic oligonucleotide
ggccuccuuccugaauccuugga

SEQ ID NO: 2630 - RNA, 23 nt, Artificial Sequence
  Description of Artificial Sequence: Synthetic oligonucleotide
gcuuccuucaaauaagauggucc

SEQ ID NO: 2631 - RNA, 23 nt, Artificial Sequence
  Description of Artificial Sequence: Synthetic oligonucleotide
uguugaaauuccguaaacuuaac

SEQ ID NO: 2632 - RNA, 23 nt, Artificial Sequence
  Description of Artificial Sequence: Synthetic oligonucleotide
cgacacucauacagccaaguaug

SEQ ID NO: 2633 - RNA, 23 nt, Artificial Sequence
  Description of Artificial Sequence: Synthetic oligonucleotide
aagcacagaucuaccuuggugau

SEQ ID NO: 2634 - RNA, 23 nt, Artificial Sequence
  Description of Artificial Sequence: Synthetic oligonucleotide
ugcuuucaacguggaguuugaug

SEQ ID NO: 2635 - RNA, 23 nt, Artificial Sequence
  Description of Artificial Sequence: Synthetic oligonucleotide
uuuagcuaagcacagaucuaccu

SEQ ID NO: 2636 - RNA, 23 nt, Artificial Sequence
  Description of Artificial Sequence: Synthetic oligonucleotide
aguugugauacagaguauauuuc

SEQ ID NO: 2637 - RNA, 23 nt, Artificial Sequence
  Description of Artificial Sequence: Synthetic oligonucleotide
acacucauacagccaaguaugac

SEQ ID NO: 2638 - RNA, 23 nt, Artificial Sequence
  Description of Artificial Sequence: Synthetic oligonucleotide
cuaguuaaggcaaaucagguaaa

SEQ ID NO: 2639 - RNA, 23 nt, Artificial Sequence
  Description of Artificial Sequence: Synthetic oligonucleotide
gaguugugauacagaguauauuu

SEQ ID NO: 2640 - RNA, 23 nt, Artificial Sequence
  Description of Artificial Sequence: Synthetic oligonucleotide
guugacaucgacacucauacagc

SEQ ID NO: 2641 - RNA, 23 nt, Artificial Sequence
  Description of Artificial Sequence: Synthetic oligonucleotide
caagauaaauugagcuaguuaag

SEQ ID NO: 2642 - RNA, 23 nt, Artificial Sequence
  Description of Artificial Sequence: Synthetic oligonucleotide
ucuagguauuuuuuugaagguug

SEQ ID NO: 2643 - RNA, 23 nt, Artificial Sequence
  Description of Artificial Sequence: Synthetic oligonucleotide
guuggugcuuuguuuaugguagu

SEQ ID NO: 2644 - RNA, 23 nt, Artificial Sequence
  Description of Artificial Sequence: Synthetic oligonucleotide
guugugauacagaguauauuucc

SEQ ID NO: 2645 - RNA, 23 nt, Artificial Sequence
  Description of Artificial Sequence: Synthetic oligonucleotide
ccucuucuggaaugugugaccug

SEQ ID NO: 2646 - RNA, 23 nt, Artificial Sequence
  Description of Artificial Sequence: Synthetic oligonucleotide
gacuggccguucuagguauuuuu

SEQ ID NO: 2647 - RNA, 23 nt, Artificial Sequence
  Description of Artificial Sequence: Synthetic oligonucleotide
aaaucagguaaaauagucaugau

SEQ ID NO: 2648 - RNA, 23 nt, Artificial Sequence
  Description of Artificial Sequence: Synthetic oligonucleotide
gauuccauuaaaacaaagggcaa

SEQ ID NO: 2649 - RNA, 23 nt, Artificial Sequence
  Description of Artificial Sequence: Synthetic oligonucleotide
ggcaagagugcugacuucacuaa

SEQ ID NO: 2650 - RNA, 23 nt, Artificial Sequence
  Description of Artificial Sequence: Synthetic oligonucleotide
gcuuucaacguggaguuugauga

SEQ ID NO: 2651 - RNA, 23 nt, Artificial Sequence
  Description of Artificial Sequence: Synthetic oligonucleotide
gguuggugcuuuguuuaugguag

SEQ ID NO: 2652 - RNA, 23 nt, Artificial Sequence
  Description of Artificial Sequence: Synthetic oligonucleotide
gacacucauacagccaaguauga

SEQ ID NO: 2653 - RNA, 23 nt, Artificial Sequence
  Description of Artificial Sequence: Synthetic oligonucleotide
gaauaaaguaccuugacuuuguu

SEQ ID NO: 2654 - RNA, 23 nt, Artificial Sequence
  Description of Artificial Sequence: Synthetic oligonucleotide
uaaugacuuuugaauuacagaga

SEQ ID NO: 2655 - RNA, 23 nt, Artificial Sequence
  Description of Artificial Sequence: Synthetic oligonucleotide
uagucaugauucuauguaaugua

SEQ ID NO: 2656 - RNA, 23 nt, Artificial Sequence
  Description of Artificial Sequence: Synthetic oligonucleotide
gugaccuggauugugcucaagga

SEQ ID NO: 2657 - RNA, 23 nt, Artificial Sequence
  Description of Artificial Sequence: Synthetic oligonucleotide
uugacaucgacacucauacagcc

SEQ ID NO: 2658 - RNA, 23 nt, Artificial Sequence
  Description of Artificial Sequence: Synthetic oligonucleotide
cugaagaacaggcaaaucaaagc

SEQ ID NO: 2659 - RNA, 23 nt, Artificial Sequence
  Description of Artificial Sequence: Synthetic oligonucleotide
uccguaaacuuaacuucaauggg

SEQ ID NO: 2660 - RNA, 23 nt, Artificial Sequence
  Description of Artificial Sequence: Synthetic oligonucleotide
ucagguaaaauagucaugauucu

SEQ ID NO: 2661 - RNA, 23 nt, Artificial Sequence
  Description of Artificial Sequence: Synthetic oligonucleotide
aaguaccuugacuuuguucacag

SEQ ID NO: 2662 - RNA, 23 nt, Artificial Sequence
  Description of Artificial Sequence: Synthetic oligonucleotide
ggccguucuagguauuuuuuuga

SEQ ID NO: 2663 - RNA, 23 nt, Artificial Sequence
  Description of Artificial Sequence: Synthetic oligonucleotide
uguuuaugguaguaguuuuucug

SEQ ID NO: 2664 - RNA, 23 nt, Artificial Sequence
  Description of Artificial Sequence: Synthetic oligonucleotide
aacguggaguuugaugacucuca

SEQ ID NO: 2665 - RNA, 23 nt, Artificial Sequence
  Description of Artificial Sequence: Synthetic oligonucleotide
cuuucaacguggaguuugaugac

SEQ ID NO: 2666 - RNA, 23 nt, Artificial Sequence
  Description of Artificial Sequence: Synthetic oligonucleotide
uagaguugugauacagaguauau

SEQ ID NO: 2667 - RNA, 23 nt, Artificial Sequence
  Description of Artificial Sequence: Synthetic oligonucleotide
aguaccuugacuuuguucacagc

SEQ ID NO: 2668 - RNA, 23 nt, Artificial Sequence
  Description of Artificial Sequence: Synthetic oligonucleotide
auuagaguugugauacagaguau

SEQ ID NO: 2669 - RNA, 23 nt, Artificial Sequence
  Description of Artificial Sequence: Synthetic oligonucleotide
guugagugcaaauccauagcaca

SEQ ID NO: 2670 - RNA, 23 nt, Artificial Sequence
  Description of Artificial Sequence: Synthetic oligonucleotide
ggcaaaucagguaaaauagucau

SEQ ID NO: 2671 - RNA, 23 nt, Artificial Sequence
  Description of Artificial Sequence: Synthetic oligonucleotide
cuaagcacagaucuaccuuggug

SEQ ID NO: 2672 - RNA, 23 nt, Artificial Sequence
  Description of Artificial Sequence: Synthetic oligonucleotide
ugacuuuguucacagcauguagg

SEQ ID NO: 2673 - RNA, 23 nt, Artificial Sequence
  Description of Artificial Sequence: Synthetic oligonucleotide
acuggccguucuagguauuuuuu

SEQ ID NO: 2674 - RNA, 23 nt, Artificial Sequence
  Description of Artificial Sequence: Synthetic oligonucleotide
cagccaaguaugacccuucccug

SEQ ID NO: 2675 - RNA, 23 nt, Artificial Sequence
  Description of Artificial Sequence: Synthetic oligonucleotide
uuuaugguaguaguuuuucugua

SEQ ID NO: 2676 - RNA, 23 nt, Artificial Sequence
  Description of Artificial Sequence: Synthetic oligonucleotide
uaaauugagcuaguuaaggcaaa

SEQ ID NO: 2677 - RNA, 23 nt, Artificial Sequence
  Description of Artificial Sequence: Synthetic oligonucleotide
ugacuaaaaugcugcuuuuaaaa

SEQ ID NO: 2678 - RNA, 23 nt, Artificial Sequence
  Description of Artificial Sequence: Synthetic oligonucleotide
gaacuucacuugguucacuggaa

SEQ ID NO: 2679 - RNA, 23 nt, Artificial Sequence
  Description of Artificial Sequence: Synthetic oligonucleotide
guucuagguauuuuuuugaaggu

SEQ ID NO: 2680 - RNA, 23 nt, Artificial Sequence
  Description of Artificial Sequence: Synthetic oligonucleotide
uaagcacagaucuaccuugguga

SEQ ID NO: 2681 - RNA, 23 nt, Artificial Sequence
  Description of Artificial Sequence: Synthetic oligonucleotide
uggccguucuagguauuuuuuug

SEQ ID NO: 2682 - RNA, 23 nt, Artificial Sequence
  Description of Artificial Sequence: Synthetic oligonucleotide
gacuaaaaugcugcuuuuaaaac

SEQ ID NO: 2683 - RNA, 23 nt, Artificial Sequence
  Description of Artificial Sequence: Synthetic oligonucleotide
aagaacaggcaaaucaaagcuuc

SEQ ID NO: 2684 - RNA, 23 nt, Artificial Sequence
  Description of Artificial Sequence: Synthetic oligonucleotide
ggugcuuuguuuaugguaguagu

SEQ ID NO: 2685 - RNA, 23 nt, Artificial Sequence
  Description of Artificial Sequence: Synthetic oligonucleotide
auaauuagaguugugauacagag

SEQ ID NO: 2686 - RNA, 23 nt, Artificial Sequence
  Description of Artificial Sequence: Synthetic oligonucleotide
ggcugguuggugcuuuguuuaug

SEQ ID NO: 2687 - RNA, 23 nt, Artificial Sequence
  Description of Artificial Sequence: Synthetic oligonucleotide
cuuccuucaaauaagaugguccc

SEQ ID NO: 2688 - RNA, 23 nt, Artificial Sequence
  Description of Artificial Sequence: Synthetic oligonucleotide
uggccuccuuccugaauccuugg

SEQ ID NO: 2689 - RNA, 23 nt, Artificial Sequence
  Description of Artificial Sequence: Synthetic oligonucleotide
augauucuauguaauguaaacca

SEQ ID NO: 2690 - RNA, 23 nt, Artificial Sequence
  Description of Artificial Sequence: Synthetic oligonucleotide
gcugguuggugcuuuguuuaugg

SEQ ID NO: 2691 - RNA, 23 nt, Artificial Sequence
  Description of Artificial Sequence: Synthetic oligonucleotide
cacucauacagccaaguaugacc

SEQ ID NO: 2692 - RNA, 23 nt, Artificial Sequence
  Description of Artificial Sequence: Synthetic oligonucleotide
acaucgacacucauacagccaag

SEQ ID NO: 2693 - RNA, 23 nt, Artificial Sequence
  Description of Artificial Sequence: Synthetic oligonucleotide
gagcacuggcauaaggacuuccc

SEQ ID NO: 2694 - RNA, 23 nt, Artificial Sequence
  Description of Artificial Sequence: Synthetic oligonucleotide
ucaacguggaguuugaugacucu

SEQ ID NO: 2695 - RNA, 23 nt, Artificial Sequence
  Description of Artificial Sequence: Synthetic oligonucleotide
aggcaaaucagguaaaauaguca

SEQ ID NO: 2696 - RNA, 23 nt, Artificial Sequence
  Description of Artificial Sequence: Synthetic oligonucleotide
gccuucagaaaguuguugaugug

SEQ ID NO: 2697 - RNA, 23 nt, Artificial Sequence
  Description of Artificial Sequence: Synthetic oligonucleotide
gcaaaucagguaaaauagucaug

SEQ ID NO: 2698 - RNA, 23 nt, Artificial Sequence
  Description of Artificial Sequence: Synthetic oligonucleotide
uaaggcaaaucagguaaaauagu

SEQ ID NO: 2699 - RNA, 23 nt, Artificial Sequence
  Description of Artificial Sequence: Synthetic oligonucleotide
aagggcaagagugcugacuucac

SEQ ID NO: 2700 - RNA, 23 nt, Artificial Sequence
  Description of Artificial Sequence: Synthetic oligonucleotide
cuggccguucuagguauuuuuuu

SEQ ID NO: 2701 - RNA, 23 nt, Artificial Sequence
  Description of Artificial Sequence: Synthetic oligonucleotide
accgggccuucagaaaguuguug

SEQ ID NO: 2702 - RNA, 23 nt, Artificial Sequence
  Description of Artificial Sequence: Synthetic oligonucleotide
aaggcaaaucagguaaaauaguc

SEQ ID NO: 2703 - RNA, 23 nt, Artificial Sequence
  Description of Artificial Sequence: Synthetic oligonucleotide
cugaggauccucaacaaugguca

SEQ ID NO: 2704 - RNA, 23 nt, Artificial Sequence
  Description of Artificial Sequence: Synthetic oligonucleotide
acuucacuugguucacuggaaca

SEQ ID NO: 2705 - RNA, 23 nt, Artificial Sequence
  Description of Artificial Sequence: Synthetic oligonucleotide
gaagaacugaugguggacaacug

SEQ ID NO: 2706 - RNA, 23 nt, Artificial Sequence
  Description of Artificial Sequence: Synthetic oligonucleotide
agaauaaaguaccuugacuuugu

SEQ ID NO: 2707 - RNA, 23 nt, Artificial Sequence
  Description of Artificial Sequence: Synthetic oligonucleotide
gacuuuguucacagcauguaggg

SEQ ID NO: 2708 - RNA, 23 nt, Artificial Sequence
  Description of Artificial Sequence: Synthetic oligonucleotide
gaaauaagaauaaaguaccuuga

SEQ ID NO: 2709 - RNA, 23 nt, Artificial Sequence
  Description of Artificial Sequence: Synthetic oligonucleotide
guaguaguuuuucuguaacacag

SEQ ID NO: 2710 - RNA, 23 nt, Artificial Sequence
  Description of Artificial Sequence: Synthetic oligonucleotide
agccaaguaugacccuucccuga

SEQ ID NO: 2711 - RNA, 23 nt, Artificial Sequence
  Description of Artificial Sequence: Synthetic oligonucleotide
gguugagugcaaauccauagcac

SEQ ID NO: 2712 - RNA, 23 nt, Artificial Sequence
  Description of Artificial Sequence: Synthetic oligonucleotide
cgggccuucagaaaguuguugau

SEQ ID NO: 2713 - RNA, 23 nt, Artificial Sequence
  Description of Artificial Sequence: Synthetic oligonucleotide
ugaggauccucaacaauggucau

SEQ ID NO: 2714 - RNA, 23 nt, Artificial Sequence
  Description of Artificial Sequence: Synthetic oligonucleotide
uaauuagaguugugauacagagu

SEQ ID NO: 2715 - RNA, 23 nt, Artificial Sequence
  Description of Artificial Sequence: Synthetic oligonucleotide
uucaacguggaguuugaugacuc

SEQ ID NO: 2716 - RNA, 23 nt, Artificial Sequence
  Description of Artificial Sequence: Synthetic oligonucleotide
augacuuuugaauuacagagaua

SEQ ID NO: 2717 - RNA, 23 nt, Artificial Sequence
  Description of Artificial Sequence: Synthetic oligonucleotide
ccugaggauccucaacaaugguc

SEQ ID NO: 2718 - RNA, 23 nt, Artificial Sequence
  Description of Artificial Sequence: Synthetic oligonucleotide
uggaguuugaugacucucaggac

SEQ ID NO: 2719 - RNA, 23 nt, Artificial Sequence
  Description of Artificial Sequence: Synthetic oligonucleotide
gcuuuuaaaacauaggaaaguag

SEQ ID NO: 2720 - RNA, 23 nt, Artificial Sequence
  Description of Artificial Sequence: Synthetic oligonucleotide
guuuaugguaguaguuuuucugu

SEQ ID NO: 2721 - RNA, 23 nt, Artificial Sequence
  Description of Artificial Sequence: Synthetic oligonucleotide
agaacuucacuugguucacugga

SEQ ID NO: 2722 - RNA, 23 nt, Artificial Sequence
  Description of Artificial Sequence: Synthetic oligonucleotide
auaaauugagcuaguuaaggcaa

SEQ ID NO: 2723 - RNA, 23 nt, Artificial Sequence
  Description of Artificial Sequence: Synthetic oligonucleotide
gcuuuguuuaugguaguaguuuu

SEQ ID NO: 2724 - RNA, 23 nt, Artificial Sequence
  Description of Artificial Sequence: Synthetic oligonucleotide
caaagggcaagagugcugacuuc

SEQ ID NO: 2725 - RNA, 23 nt, Artificial Sequence
  Description of Artificial Sequence: Synthetic oligonucleotide
guggaguuugaugacucucagga

SEQ ID NO: 2726 - RNA, 23 nt, Artificial Sequence
  Description of Artificial Sequence: Synthetic oligonucleotide
ccgggccuucagaaaguuguuga

SEQ ID NO: 2727 - RNA, 23 nt, Artificial Sequence
  Description of Artificial Sequence: Synthetic oligonucleotide
gggcaagagugcugacuucacua

SEQ ID NO: 2728 - RNA, 23 nt, Artificial Sequence
  Description of Artificial Sequence: Synthetic oligonucleotide
ucagccacugaagaacaggcaaa

SEQ ID NO: 2729 - RNA, 23 nt, Artificial Sequence
  Description of Artificial Sequence: Synthetic oligonucleotide
ggauuccauuaaaacaaagggca

SEQ ID NO: 2730 - RNA, 23 nt, Artificial Sequence
  Description of Artificial Sequence: Synthetic oligonucleotide
uaguaguuuuucuguaacacaga

SEQ ID NO: 2731 - RNA, 23 nt, Artificial Sequence
  Description of Artificial Sequence: Synthetic oligonucleotide
uagguauuuuuuugaagguuggc

SEQ ID NO: 2732 - RNA, 23 nt, Artificial Sequence
  Description of Artificial Sequence: Synthetic oligonucleotide
uauccaaauaaugaaucuucggg

SEQ ID NO: 2733 - RNA, 23 nt, Artificial Sequence
  Description of Artificial Sequence: Synthetic oligonucleotide
uaaaacauaggaaaguagaaugg

SEQ ID NO: 2734 - RNA, 23 nt, Artificial Sequence
  Description of Artificial Sequence: Synthetic oligonucleotide
ugaugacucucaggacaaagcag

SEQ ID NO: 2735 - RNA, 23 nt, Artificial Sequence
  Description of Artificial Sequence: Synthetic oligonucleotide
ugagcuaguuaaggcaaaucagg

SEQ ID NO: 2736 - RNA, 23 nt, Artificial Sequence
  Description of Artificial Sequence: Synthetic oligonucleotide
ucccugaggauccucaacaaugg

SEQ ID NO: 2737 - RNA, 23 nt, Artificial Sequence
  Description of Artificial Sequence: Synthetic oligonucleotide
cugguuggugcuuuguuuauggu

SEQ ID NO: 2738 - RNA, 23 nt, Artificial Sequence
  Description of Artificial Sequence: Synthetic oligonucleotide
cuagguauuuuuuugaagguugg

SEQ ID NO: 2739 - RNA, 23 nt, Artificial Sequence
  Description of Artificial Sequence: Synthetic oligonucleotide
aaugaaucuucggguguuucccu

SEQ ID NO: 2740 - RNA, 23 nt, Artificial Sequence
  Description of Artificial Sequence: Synthetic oligonucleotide
gguaguaguuuuucuguaacaca

SEQ ID NO: 2741 - RNA, 23 nt, Artificial Sequence
  Description of Artificial Sequence: Synthetic oligonucleotide
gaguuugaugacucucaggacaa

SEQ ID NO: 2742 - RNA, 23 nt, Artificial Sequence
  Description of Artificial Sequence: Synthetic oligonucleotide
auaaugaaucuucggguguuucc

SEQ ID NO: 2743 - RNA, 23 nt, Artificial Sequence
  Description of Artificial Sequence: Synthetic oligonucleotide
uccaaauaaugaaucuucgggug

SEQ ID NO: 2744 - RNA, 23 nt, Artificial Sequence
  Description of Artificial Sequence: Synthetic oligonucleotide
acuuuguucacagcauguagggu

SEQ ID NO: 2745 - RNA, 23 nt, Artificial Sequence
  Description of Artificial Sequence: Synthetic oligonucleotide
ggauugugcucaaggaacccauc

SEQ ID NO: 2746 - RNA, 23 nt, Artificial Sequence
  Description of Artificial Sequence: Synthetic oligonucleotide
ugguuggugcuuuguuuauggua

SEQ ID NO: 2747 - RNA, 23 nt, Artificial Sequence
  Description of Artificial Sequence: Synthetic oligonucleotide
augaaucuucggguguuucccuu

SEQ ID NO: 2748 - RNA, 23 nt, Artificial Sequence
  Description of Artificial Sequence: Synthetic oligonucleotide
augguaguaguuuuucuguaaca

SEQ ID NO: 2749 - RNA, 23 nt, Artificial Sequence
  Description of Artificial Sequence: Synthetic oligonucleotide
gaagaacaggcaaaucaaagcuu

SEQ ID NO: 2750 - RNA, 23 nt, Artificial Sequence
  Description of Artificial Sequence: Synthetic oligonucleotide
guaaaauagucaugauucuaugu

SEQ ID NO: 2751 - RNA, 23 nt, Artificial Sequence
  Description of Artificial Sequence: Synthetic oligonucleotide
ggacuggccguucuagguauuuu

SEQ ID NO: 2752 - RNA, 23 nt, Artificial Sequence
  Description of Artificial Sequence: Synthetic oligonucleotide
uucccugaggauccucaacaaug

SEQ ID NO: 2753 - RNA, 23 nt, Artificial Sequence
  Description of Artificial Sequence: Synthetic oligonucleotide
uggcugguuggugcuuuguuuau

SEQ ID NO: 2754 - RNA, 23 nt, Artificial Sequence
  Description of Artificial Sequence: Synthetic oligonucleotide
uucagaaaguuguugaugugcug

SEQ ID NO: 2755 - RNA, 23 nt, Artificial Sequence
  Description of Artificial Sequence: Synthetic oligonucleotide
ucacuaacuucgauccucguggc

SEQ ID NO: 2756 - RNA, 23 nt, Artificial Sequence
  Description of Artificial Sequence: Synthetic oligonucleotide
ggccuucagaaaguuguugaugu

SEQ ID NO: 2757 - RNA, 23 nt, Artificial Sequence
  Description of Artificial Sequence: Synthetic oligonucleotide
ccugagcacuggcauaaggacuu

SEQ ID NO: 2758 - RNA, 23 nt, Artificial Sequence
  Description of Artificial Sequence: Synthetic oligonucleotide
agcuaguuaaggcaaaucaggua

SEQ ID NO: 2759 - RNA, 23 nt, Artificial Sequence
  Description of Artificial Sequence: Synthetic oligonucleotide
cccugaggauccucaacaauggu

SEQ ID NO: 2760 - RNA, 23 nt, Artificial Sequence
  Description of Artificial Sequence: Synthetic oligonucleotide
uuguuuaugguaguaguuuuucu

SEQ ID NO: 2761 - RNA, 23 nt, Artificial Sequence
  Description of Artificial Sequence: Synthetic oligonucleotide
ugugugaccuggauugugcucaa

SEQ ID NO: 2762 - RNA, 23 nt, Artificial Sequence
  Description of Artificial Sequence: Synthetic oligonucleotide
ugacaucgacacucauacagcca

SEQ ID NO: 2763 - RNA, 23 nt, Artificial Sequence
  Description of Artificial Sequence: Synthetic oligonucleotide
uggauugugcucaaggaacccau

SEQ ID NO: 2764 - RNA, 23 nt, Artificial Sequence
  Description of Artificial Sequence: Synthetic oligonucleotide
acucauacagccaaguaugaccc

SEQ ID NO: 2765 - RNA, 23 nt, Artificial Sequence
  Description of Artificial Sequence: Synthetic oligonucleotide
gguaaaauagucaugauucuaug

SEQ ID NO: 2766 - RNA, 23 nt, Artificial Sequence
  Description of Artificial Sequence: Synthetic oligonucleotide
uugugcucaaggaacccaucagc

SEQ ID NO: 2767 - RNA, 23 nt, Artificial Sequence
  Description of Artificial Sequence: Synthetic oligonucleotide
cccgaagaacugaugguggacaa

SEQ ID NO: 2768 - RNA, 23 nt, Artificial Sequence
  Description of Artificial Sequence: Synthetic oligonucleotide
cuaauaaaaugugaagacuagac

SEQ ID NO: 2769 - RNA, 23 nt, Artificial Sequence
  Description of Artificial Sequence: Synthetic oligonucleotide
guggcugguuggugcuuuguuua

SEQ ID NO: 2770 - RNA, 23 nt, Artificial Sequence
  Description of Artificial Sequence: Synthetic oligonucleotide
cuuuguucacagcauguagggug

SEQ ID NO: 2771 - RNA, 23 nt, Artificial Sequence
  Description of Artificial Sequence: Synthetic oligonucleotide
ccuucaaauaagauggucccaua

SEQ ID NO: 2772 - RNA, 23 nt, Artificial Sequence
  Description of Artificial Sequence: Synthetic oligonucleotide
cuuuuaaaacauaggaaaguaga

SEQ ID NO: 2773 - RNA, 23 nt, Artificial Sequence
  Description of Artificial Sequence: Synthetic oligonucleotide
cuuuguuuaugguaguaguuuuu

SEQ ID NO: 2774 - RNA, 23 nt, Artificial Sequence
  Description of Artificial Sequence: Synthetic oligonucleotide
gagcuaguuaaggcaaaucaggu

SEQ ID NO: 2775 - RNA, 23 nt, Artificial Sequence
  Description of Artificial Sequence: Synthetic oligonucleotide
agguaaaauagucaugauucuau

SEQ ID NO: 2776 - RNA, 23 nt, Artificial Sequence
  Description of Artificial Sequence: Synthetic oligonucleotide
uggacuggccguucuagguauuu

SEQ ID NO: 2777 - RNA, 23 nt, Artificial Sequence
  Description of Artificial Sequence: Synthetic oligonucleotide
gcucagccacugaagaacaggca

SEQ ID NO: 2778 - RNA, 23 nt, Artificial Sequence
  Description of Artificial Sequence: Synthetic oligonucleotide
ucuggaaugugugaccuggauug

SEQ ID NO: 2779 - RNA, 23 nt, Artificial Sequence
  Description of Artificial Sequence: Synthetic oligonucleotide
guucacagcauguagggugauga

SEQ ID NO: 2780 - RNA, 23 nt, Artificial Sequence
  Description of Artificial Sequence: Synthetic oligonucleotide
cauacagccaaguaugacccuuc

SEQ ID NO: 2781 - RNA, 23 nt, Artificial Sequence
  Description of Artificial Sequence: Synthetic oligonucleotide
accugagcacuggcauaaggacu

SEQ ID NO: 2782 - RNA, 23 nt, Artificial Sequence
  Description of Artificial Sequence: Synthetic oligonucleotide
gugcucaaggaacccaucagcgu

SEQ ID NO: 2783 - RNA, 23 nt, Artificial Sequence
  Description of Artificial Sequence: Synthetic oligonucleotide
ucuucuggaaugugugaccugga

SEQ ID NO: 2784 - RNA, 23 nt, Artificial Sequence
  Description of Artificial Sequence: Synthetic oligonucleotide
gauaaauugagcuaguuaaggca

SEQ ID NO: 2785 - RNA, 23 nt, Artificial Sequence
  Description of Artificial Sequence: Synthetic oligonucleotide
gguauuuuuuugaagguuggcag

SEQ ID NO: 2786 - RNA, 23 nt, Artificial Sequence
  Description of Artificial Sequence: Synthetic oligonucleotide
uauaauuagaguugugauacaga

SEQ ID NO: 2787 - RNA, 23 nt, Artificial Sequence
  Description of Artificial Sequence: Synthetic oligonucleotide
gaugacucucaggacaaagcagu

SEQ ID NO: 2788 - RNA, 23 nt, Artificial Sequence
  Description of Artificial Sequence: Synthetic oligonucleotide
cucauacagccaaguaugacccu

SEQ ID NO: 2789 - RNA, 23 nt, Artificial Sequence
  Description of Artificial Sequence: Synthetic oligonucleotide
agguauuuuuuugaagguuggca

SEQ ID NO: 2790 - RNA, 23 nt, Artificial Sequence
  Description of Artificial Sequence: Synthetic oligonucleotide
uucacagcauguagggugaugag

SEQ ID NO: 2791 - RNA, 23 nt, Artificial Sequence
  Description of Artificial Sequence: Synthetic oligonucleotide
guuauaauuagaguugugauaca

SEQ ID NO: 2792 - RNA, 23 nt, Artificial Sequence
  Description of Artificial Sequence: Synthetic oligonucleotide
gggauuuugggaaagcugugcag

SEQ ID NO: 2793 - RNA, 23 nt, Artificial Sequence
  Description of Artificial Sequence: Synthetic oligonucleotide
auuaaaacaaagggcaagagugc

SEQ ID NO: 2794 - RNA, 23 nt, Artificial Sequence
  Description of Artificial Sequence: Synthetic oligonucleotide
gcucaaggaacccaucagcguca

SEQ ID NO: 2795 - RNA, 23 nt, Artificial Sequence
  Description of Artificial Sequence: Synthetic oligonucleotide
cuucagaaaguuguugaugugcu

SEQ ID NO: 2796 - RNA, 23 nt, Artificial Sequence
  Description of Artificial Sequence: Synthetic oligonucleotide
auccaaauaaugaaucuucgggu

SEQ ID NO: 2797 - RNA, 23 nt, Artificial Sequence
  Description of Artificial Sequence: Synthetic oligonucleotide
acagcauguagggugaugagcac

SEQ ID NO: 2798 - RNA, 23 nt, Artificial Sequence
  Description of Artificial Sequence: Synthetic oligonucleotide
aagauaaauugagcuaguuaagg

SEQ ID NO: 2799 - RNA, 23 nt, Artificial Sequence
  Description of Artificial Sequence: Synthetic oligonucleotide
agcucagccacugaagaacaggc

SEQ ID NO: 2800 - RNA, 23 nt, Artificial Sequence
  Description of Artificial Sequence: Synthetic oligonucleotide
cacagcauguagggugaugagca

SEQ ID NO: 2801 - RNA, 23 nt, Artificial Sequence
  Description of Artificial Sequence: Synthetic oligonucleotide
aaauaaugaaucuucggguguuu

SEQ ID NO: 2802 - RNA, 23 nt, Artificial Sequence
  Description of Artificial Sequence: Synthetic oligonucleotide
aaggaacccaucagcgucagcag

SEQ ID NO: 2803 - RNA, 23 nt, Artificial Sequence
  Description of Artificial Sequence: Synthetic oligonucleotide
uuuguucacagcauguaggguga

SEQ ID NO: 2804 - RNA, 23 nt, Artificial Sequence
  Description of Artificial Sequence: Synthetic oligonucleotide
uaaaacaaagggcaagagugcug

SEQ ID NO: 2805 - RNA, 23 nt, Artificial Sequence
  Description of Artificial Sequence: Synthetic oligonucleotide
aaugugugaccuggauugugcuc

SEQ ID NO: 2806 - RNA, 23 nt, Artificial Sequence
  Description of Artificial Sequence: Synthetic oligonucleotide
caaauaaugaaucuucggguguu

SEQ ID NO: 2807 - RNA, 23 nt, Artificial Sequence
  Description of Artificial Sequence: Synthetic oligonucleotide
guauuuuuuugaagguuggcagc

SEQ ID NO: 2808 - RNA, 23 nt, Artificial Sequence
  Description of Artificial Sequence: Synthetic oligonucleotide
ugugcucaaggaacccaucagcg

SEQ ID NO: 2809 - RNA, 23 nt, Artificial Sequence
  Description of Artificial Sequence: Synthetic oligonucleotide
aauaaugaaucuucggguguuuc

SEQ ID NO: 2810 - RNA, 23 nt, Artificial Sequence
  Description of Artificial Sequence: Synthetic oligonucleotide
cuguggcugguuggugcuuuguu

SEQ ID NO: 2811 - RNA, 23 nt, Artificial Sequence
  Description of Artificial Sequence: Synthetic oligonucleotide
ucaaggaacccaucagcgucagc

SEQ ID NO: 2812 - RNA, 23 nt, Artificial Sequence
  Description of Artificial Sequence: Synthetic oligonucleotide
cauuaaaacaaagggcaagagug

SEQ ID NO: 2813 - RNA, 23 nt, Artificial Sequence
  Description of Artificial Sequence: Synthetic oligonucleotide
ugcuguggcugguuggugcuuug

SEQ ID NO: 2814 - RNA, 23 nt, Artificial Sequence
  Description of Artificial Sequence: Synthetic oligonucleotide
cccagcucagccacugaagaaca

SEQ ID NO: 2815 - RNA, 23 nt, Artificial Sequence
  Description of Artificial Sequence: Synthetic oligonucleotide
ccaaauaaugaaucuucgggugu

SEQ ID NO: 2816 - RNA, 23 nt, Artificial Sequence
  Description of Artificial Sequence: Synthetic oligonucleotide
uggaaugugugaccuggauugug

SEQ ID NO: 2817 - RNA, 23 nt, Artificial Sequence
  Description of Artificial Sequence: Synthetic oligonucleotide
agcauguagggugaugagcacuc

SEQ ID NO: 2818 - RNA, 23 nt, Artificial Sequence
  Description of Artificial Sequence: Synthetic oligonucleotide
auggacuggccguucuagguauu

SEQ ID NO: 2819 - RNA, 23 nt, Artificial Sequence
  Description of Artificial Sequence: Synthetic oligonucleotide
agauaaauugagcuaguuaaggc

SEQ ID NO: 2820 - RNA, 23 nt, Artificial Sequence
  Description of Artificial Sequence: Synthetic oligonucleotide
cagaaaguuguugaugugcugga

SEQ ID NO: 2821 - RNA, 23 nt, Artificial Sequence
  Description of Artificial Sequence: Synthetic oligonucleotide
aaaacaaagggcaagagugcuga

SEQ ID NO: 2822 - RNA, 23 nt, Artificial Sequence
  Description of Artificial Sequence: Synthetic oligonucleotide
gaccugagcacuggcauaaggac

SEQ ID NO: 2823 - RNA, 23 nt, Artificial Sequence
  Description of Artificial Sequence: Synthetic oligonucleotide
acugaugguggacaacuggcgcc

SEQ ID NO: 2824 - RNA, 23 nt, Artificial Sequence
  Description of Artificial Sequence: Synthetic oligonucleotide
aaacaaagggcaagagugcugac

SEQ ID NO: 2825 - RNA, 23 nt, Artificial Sequence
  Description of Artificial Sequence: Synthetic oligonucleotide
caacggaccugagcacuggcaua

SEQ ID NO: 2826 - RNA, 23 nt, Artificial Sequence
  Description of Artificial Sequence: Synthetic oligonucleotide
uuugggaaagcugugcagcaacc

SEQ ID NO: 2827 - RNA, 23 nt, Artificial Sequence
  Description of Artificial Sequence: Synthetic oligonucleotide
ggaacccaucagcgucagcagcg

SEQ ID NO: 2828 - RNA, 23 nt, Artificial Sequence
  Description of Artificial Sequence: Synthetic oligonucleotide
ccagcucagccacugaagaacag

SEQ ID NO: 2829 - RNA, 23 nt, Artificial Sequence
  Description of Artificial Sequence: Synthetic oligonucleotide
uuuuuugaagguuggcagcgcua

SEQ ID NO: 2830 - RNA, 23 nt, Artificial Sequence
  Description of Artificial Sequence: Synthetic oligonucleotide
aaguaugacccuucccugaagcc

SEQ ID NO: 2831 - RNA, 23 nt, Artificial Sequence
  Description of Artificial Sequence: Synthetic oligonucleotide
accuacccaggcucacugaccac

SEQ ID NO: 2832 - RNA, 23 nt, Artificial Sequence
  Description of Artificial Sequence: Synthetic oligonucleotide
cuacccaggcucacugaccaccc

SEQ ID NO: 2833 - RNA, 23 nt, Artificial Sequence
  Description of Artificial Sequence: Synthetic oligonucleotide
ugauggacuggccguucuaggua

SEQ ID NO: 2834 - RNA, 23 nt, Artificial Sequence
  Description of Artificial Sequence: Synthetic oligonucleotide
ggaccugagcacuggcauaagga

SEQ ID NO: 2835 - RNA, 23 nt, Artificial Sequence
  Description of Artificial Sequence: Synthetic oligonucleotide
acccaucagcgucagcagcgagc

SEQ ID NO: 2836 - RNA, 23 nt, Artificial Sequence
  Description of Artificial Sequence: Synthetic oligonucleotide
gauggacuggccguucuagguau

SEQ ID NO: 2837 - RNA, 23 nt, Artificial Sequence
  Description of Artificial Sequence: Synthetic oligonucleotide
gauuuugggaaagcugugcagca

SEQ ID NO: 2838 - RNA, 23 nt, Artificial Sequence
  Description of Artificial Sequence: Synthetic oligonucleotide
accugauggacuggccguucuag

SEQ ID NO: 2839 - RNA, 23 nt, Artificial Sequence
  Description of Artificial Sequence: Synthetic oligonucleotide
ggaccuacccaggcucacugacc

SEQ ID NO: 2840 - RNA, 23 nt, Artificial Sequence
  Description of Artificial Sequence: Synthetic oligonucleotide
cuggaccuacccaggcucacuga

SEQ ID NO: 2841 - RNA, 23 nt, Artificial Sequence
  Description of Artificial Sequence: Synthetic oligonucleotide
cugauggacuggccguucuaggu

SEQ ID NO: 2842 - RNA, 23 nt, Artificial Sequence
  Description of Artificial Sequence: Synthetic oligonucleotide
ugaagguuggcagcgcuaaaccg

SEQ ID NO: 2843 - RNA, 23 nt, Artificial Sequence
  Description of Artificial Sequence: Synthetic oligonucleotide
ccugauggacuggccguucuagg

SEQ ID NO: 2844 - RNA, 23 nt, Artificial Sequence
  Description of Artificial Sequence: Synthetic oligonucleotide
agaacugaugguggacaacuggc

SEQ ID NO: 2845 - RNA, 23 nt, Artificial Sequence
  Description of Artificial Sequence: Synthetic oligonucleotide
acacaacugcuguggcugguugg

SEQ ID NO: 2846 - RNA, 23 nt, Artificial Sequence
  Description of Artificial Sequence: Synthetic oligonucleotide
cacaacggaccugagcacuggca

SEQ ID NO: 2847 - RNA, 23 nt, Artificial Sequence
  Description of Artificial Sequence: Synthetic oligonucleotide
cacaacugcuguggcugguuggu

SEQ ID NO: 2848 - RNA, 23 nt, Artificial Sequence
  Description of Artificial Sequence: Synthetic oligonucleotide
gaacugaugguggacaacuggcg

SEQ ID NO: 2849 - RNA, 23 nt, Artificial Sequence
  Description of Artificial Sequence: Synthetic oligonucleotide
aacugcuguggcugguuggugcu

SEQ ID NO: 2850 - RNA, 21 nt, Artificial Sequence
  Description of Artificial Sequence: Synthetic oligonucleotide
accugagcacuggcauaaggu

SEQ ID NO: 2851 - RNA, 21 nt, Artificial Sequence
  Description of Artificial Sequence: Synthetic oligonucleotide
cugagcacuggcauaaggacu

SEQ ID NO: 2852 - RNA, 21 nt, Artificial Sequence
  Description of Artificial Sequence: Synthetic oligonucleotide
ugacaucgacacucauacagu

SEQ ID NO: 2853 - RNA, 21 nt, Artificial Sequence
  Description of Artificial Sequence: Synthetic oligonucleotide
cacucauacagccaaguaugu

SEQ ID NO: 2854 - RNA, 21 nt, Artificial Sequence
  Description of Artificial Sequence: Synthetic oligonucleotide
acucauacagccaaguaugau

SEQ ID NO: 2855 - RNA, 21 nt, Artificial Sequence
  Description of Artificial Sequence: Synthetic oligonucleotide
cucauacagccaaguaugacu

SEQ ID NO: 2856 - RNA, 21 nt, Artificial Sequence
  Description of Artificial Sequence: Synthetic oligonucleotide
ccaaguaugacccuucccugu

SEQ ID NO: 2857 - RNA, 21 nt, Artificial Sequence
  Description of Artificial Sequence: Synthetic oligonucleotide
cugaggauccucaacaauggu

SEQ ID NO: 2858 - RNA, 21 nt, Artificial Sequence
  Description of Artificial Sequence: Synthetic oligonucleotide
ugaggauccucaacaaugguu

SEQ ID NO: 2859 - RNA, 21 nt, Artificial Sequence
  Description of Artificial Sequence: Synthetic oligonucleotide
gaggauccucaacaauggucu

SEQ ID NO: 2860 - RNA, 21 nt, Artificial Sequence
  Description of Artificial Sequence: Synthetic oligonucleotide
ugcuuucaacguggaguuugu

SEQ ID NO: 2861 - RNA, 21 nt, Artificial Sequence
  Description of Artificial Sequence: Synthetic oligonucleotide
gcuuucaacguggaguuugau

SEQ ID NO: 2862 - RNA, 21 nt, Artificial Sequence
  Description of Artificial Sequence: Synthetic oligonucleotide
cuuucaacguggaguuugauu

SEQ ID NO: 2863 - RNA, 21 nt, Artificial Sequence
  Description of Artificial Sequence: Synthetic oligonucleotide
uuucaacguggaguuugaugu

SEQ ID NO: 2864 - RNA, 21 nt, Artificial Sequence
  Description of Artificial Sequence: Synthetic oligonucleotide
ggaguuugaugacucucaggu

SEQ ID NO: 2865 - RNA, 21 nt, Artificial Sequence
  Description of Artificial Sequence: Synthetic oligonucleotide
ugacucucaggacaaagcagu

SEQ ID NO: 2866 - RNA, 21 nt, Artificial Sequence
  Description of Artificial Sequence: Synthetic oligonucleotide
aacuucacuugguucacuggu

SEQ ID NO: 2867 - RNA, 21 nt, Artificial Sequence
  Description of Artificial Sequence: Synthetic oligonucleotide
cugauggacuggccguucuau

SEQ ID NO: 2868 - RNA, 21 nt, Artificial Sequence
  Description of Artificial Sequence: Synthetic oligonucleotide
ugauggacuggccguucuagu

SEQ ID NO: 2869 - RNA, 21 nt, Artificial Sequence
  Description of Artificial Sequence: Synthetic oligonucleotide
gauggacuggccguucuaggu

SEQ ID NO: 2870 - RNA, 21 nt, Artificial Sequence
  Description of Artificial Sequence: Synthetic oligonucleotide
auggacuggccguucuagguu

SEQ ID NO: 2871 - RNA, 21 nt, Artificial Sequence
  Description of Artificial Sequence: Synthetic oligonucleotide
gacuggccguucuagguauuu

SEQ ID NO: 2872 - RNA, 21 nt, Artificial Sequence
  Description of Artificial Sequence: Synthetic oligonucleotide
acuggccguucuagguauuuu

SEQ ID NO: 2873 - RNA, 21 nt, Artificial Sequence
  Description of Artificial Sequence: Synthetic oligonucleotide
cuggccguucuagguauuuuu

SEQ ID NO: 2874 - RNA, 21 nt, Artificial Sequence
  Description of Artificial Sequence: Synthetic oligonucleotide
uggccguucuagguauuuuuu

SEQ ID NO: 2875 - RNA, 21 nt, Artificial Sequence
  Description of Artificial Sequence: Synthetic oligonucleotide
ggccguucuagguauuuuuuu

SEQ ID NO: 2876 - RNA, 21 nt, Artificial Sequence
  Description of Artificial Sequence: Synthetic oligonucleotide
gccguucuagguauuuuuuuu

SEQ ID NO: 2877 - RNA, 21 nt, Artificial Sequence
  Description of Artificial Sequence: Synthetic oligonucleotide
ccguucuagguauuuuuuugu

SEQ ID NO: 2878 - RNA, 21 nt, Artificial Sequence
  Description of Artificial Sequence: Synthetic oligonucleotide
cguucuagguauuuuuuugau

SEQ ID NO: 2879 - RNA, 21 nt, Artificial Sequence
  Description of Artificial Sequence: Synthetic oligonucleotide
guucuagguauuuuuuugaau

SEQ ID NO: 2880 - RNA, 21 nt, Artificial Sequence
  Description of Artificial Sequence: Synthetic oligonucleotide
uucuagguauuuuuuugaagu

SEQ ID NO: 2881 - RNA, 21 nt, Artificial Sequence
  Description of Artificial Sequence: Synthetic oligonucleotide
ucuagguauuuuuuugaaggu

SEQ ID NO: 2882 - RNA, 21 nt, Artificial Sequence
  Description of Artificial Sequence: Synthetic oligonucleotide
uagguauuuuuuugaagguuu

SEQ ID NO: 2883 - RNA, 21 nt, Artificial Sequence
  Description of Artificial Sequence: Synthetic oligonucleotide
agguauuuuuuugaagguugu

SEQ ID NO: 2884 - RNA, 21 nt, Artificial Sequence
  Description of Artificial Sequence: Synthetic oligonucleotide
gguauuuuuuugaagguuggu

SEQ ID NO: 2885 - RNA, 21 nt, Artificial Sequence
  Description of Artificial Sequence: Synthetic oligonucleotide
guauuuuuuugaagguuggcu

SEQ ID NO: 2886 - RNA, 21 nt, Artificial Sequence
  Description of Artificial Sequence: Synthetic oligonucleotide
auuuuuuugaagguuggcagu

SEQ ID NO: 2887 - RNA, 21 nt, Artificial Sequence
  Description of Artificial Sequence: Synthetic oligonucleotide
cgggccuucagaaaguuguuu

SEQ ID NO: 2888 - RNA, 21 nt, Artificial Sequence
  Description of Artificial Sequence: Synthetic oligonucleotide
gggccuucagaaaguuguugu

SEQ ID NO: 2889 - RNA, 21 nt, Artificial Sequence
  Description of Artificial Sequence: Synthetic oligonucleotide
ggccuucagaaaguuguugau

SEQ ID NO: 2890 - RNA, 21 nt, Artificial Sequence
  Description of Artificial Sequence: Synthetic oligonucleotide
ccuucagaaaguuguugaugu

SEQ ID NO: 2891 - RNA, 21 nt, Artificial Sequence
  Description of Artificial Sequence: Synthetic oligonucleotide
cuucagaaaguuguugauguu

SEQ ID NO: 2892 - RNA, 21 nt, Artificial Sequence
  Description of Artificial Sequence: Synthetic oligonucleotide
ucagaaaguuguugaugugcu

SEQ ID NO: 2893 - RNA, 21 nt, Artificial Sequence
  Description of Artificial Sequence: Synthetic oligonucleotide
gaaaguuguugaugugcuggu

SEQ ID NO: 2894 - RNA, 21 nt, Artificial Sequence
  Description of Artificial Sequence: Synthetic oligonucleotide
auuccauuaaaacaaagggcu

SEQ ID NO: 2895 - RNA, 21 nt, Artificial Sequence
  Description of Artificial Sequence: Synthetic oligonucleotide
aacaaagggcaagagugcugu

SEQ ID NO: 2896 - RNA, 21 nt, Artificial Sequence
  Description of Artificial Sequence: Synthetic oligonucleotide
agugcugacuucacuaacuuu

SEQ ID NO: 2897 - RNA, 21 nt, Artificial Sequence
  Description of Artificial Sequence: Synthetic oligonucleotide
ugcugacuucacuaacuucgu

SEQ ID NO: 2898 - RNA, 21 nt, Artificial Sequence
  Description of Artificial Sequence: Synthetic oligonucleotide
cugacuucacuaacuucgauu

SEQ ID NO: 2899 - RNA, 21 nt, Artificial Sequence
  Description of Artificial Sequence: Synthetic oligonucleotide
ugacuucacuaacuucgaucu

SEQ ID NO: 2900 - RNA, 21 nt, Artificial Sequence
  Description of Artificial Sequence: Synthetic oligonucleotide
gacuucacuaacuucgauccu

SEQ ID NO: 2901 - RNA, 21 nt, Artificial Sequence
  Description of Artificial Sequence: Synthetic oligonucleotide
cacuaacuucgauccucgugu

SEQ ID NO: 2902 - RNA, 21 nt, Artificial Sequence
  Description of Artificial Sequence: Synthetic oligonucleotide
acuaacuucgauccucguggu

SEQ ID NO: 2903 - RNA, 21 nt, Artificial Sequence
  Description of Artificial Sequence: Synthetic oligonucleotide
ccuccuuccugaauccuuggu

SEQ ID NO: 2904 - RNA, 21 nt, Artificial Sequence
  Description of Artificial Sequence: Synthetic oligonucleotide
uccuuccugaauccuuggauu

SEQ ID NO: 2905 - RNA, 21 nt, Artificial Sequence
  Description of Artificial Sequence: Synthetic oligonucleotide
ccuuccugaauccuuggauuu

SEQ ID NO: 2906 - RNA, 21 nt, Artificial Sequence
  Description of Artificial Sequence: Synthetic oligonucleotide
cuccucuucuggaaugugugu

SEQ ID NO: 2907 - RNA, 21 nt, Artificial Sequence
  Description of Artificial Sequence: Synthetic oligonucleotide
gaaugugugaccuggauuguu

SEQ ID NO: 2908 - RNA, 21 nt, Artificial Sequence
  Description of Artificial Sequence: Synthetic oligonucleotide
ugugugaccuggauugugcuu

SEQ ID NO: 2909 - RNA, 21 nt, Artificial Sequence
  Description of Artificial Sequence: Synthetic oligonucleotide
gugcucaaggaacccaucagu

SEQ ID NO: 2910 - RNA, 21 nt, Artificial Sequence
  Description of Artificial Sequence: Synthetic oligonucleotide
ucaaggaacccaucagcgucu

SEQ ID NO: 2911 - RNA, 21 nt, Artificial Sequence
  Description of Artificial Sequence: Synthetic oligonucleotide
aaggaacccaucagcgucagu

SEQ ID NO: 2912 - RNA, 21 nt, Artificial Sequence
  Description of Artificial Sequence: Synthetic oligonucleotide
ccaucagcgucagcagcgagu

SEQ ID NO: 2913 - RNA, 21 nt, Artificial Sequence
  Description of Artificial Sequence: Synthetic oligonucleotide
gaaauuccguaaacuuaacuu

SEQ ID NO: 2914 - RNA, 21 nt, Artificial Sequence
  Description of Artificial Sequence: Synthetic oligonucleotide
aaauuccguaaacuuaacuuu

SEQ ID NO: 2915 - RNA, 21 nt, Artificial Sequence
  Description of Artificial Sequence: Synthetic oligonucleotide
ccguaaacuuaacuucaaugu

SEQ ID NO: 2916 - RNA, 21 nt, Artificial Sequence
  Description of Artificial Sequence: Synthetic oligonucleotide
cguaaacuuaacuucaauggu

SEQ ID NO: 2917 - RNA, 21 nt, Artificial Sequence
  Description of Artificial Sequence: Synthetic oligonucleotide
aacugaugguggacaacuggu

SEQ ID NO: 2918 - RNA, 21 nt, Artificial Sequence
  Description of Artificial Sequence: Synthetic oligonucleotide
cucagccacugaagaacaggu

SEQ ID NO: 2919 - RNA, 21 nt, Artificial Sequence
  Description of Artificial Sequence: Synthetic oligonucleotide
agaacaggcaaaucaaagcuu

SEQ ID NO: 2920 - RNA, 21 nt, Artificial Sequence
  Description of Artificial Sequence: Synthetic oligonucleotide
aggcaaaucaaagcuuccuuu

SEQ ID NO: 2921 - RNA, 21 nt, Artificial Sequence
  Description of Artificial Sequence: Synthetic oligonucleotide
caaagcuuccuucaaauaagu

SEQ ID NO: 2922 - RNA, 21 nt, Artificial Sequence
  Description of Artificial Sequence: Synthetic oligonucleotide
aaagcuuccuucaaauaagau

SEQ ID NO: 2923 - RNA, 21 nt, Artificial Sequence
  Description of Artificial Sequence: Synthetic oligonucleotide
aagcuuccuucaaauaagauu

SEQ ID NO: 2924 - RNA, 21 nt, Artificial Sequence
  Description of Artificial Sequence: Synthetic oligonucleotide
agcuuccuucaaauaagaugu

SEQ ID NO: 2925 - RNA, 21 nt, Artificial Sequence
  Description of Artificial Sequence: Synthetic oligonucleotide
gcuuccuucaaauaagauggu

SEQ ID NO: 2926 - RNA, 21 nt, Artificial Sequence
  Description of Artificial Sequence: Synthetic oligonucleotide
gucuguauccaaauaaugaau

SEQ ID NO: 2927 - RNA, 21 nt, Artificial Sequence
  Description of Artificial Sequence: Synthetic oligonucleotide
guauccaaauaaugaaucuuu

SEQ ID NO: 2928 - RNA, 21 nt, Artificial Sequence
  Description of Artificial Sequence: Synthetic oligonucleotide
auccaaauaaugaaucuucgu

SEQ ID NO: 2929 - RNA, 21 nt, Artificial Sequence
  Description of Artificial Sequence: Synthetic oligonucleotide
uccaaauaaugaaucuucggu

SEQ ID NO: 2930 - RNA, 21 nt, Artificial Sequence
  Description of Artificial Sequence: Synthetic oligonucleotide
ccaaauaaugaaucuucgggu

SEQ ID NO: 2931 - RNA, 21 nt, Artificial Sequence
  Description of Artificial Sequence: Synthetic oligonucleotide
caaauaaugaaucuucggguu

SEQ ID NO: 2932 - RNA, 21 nt, Artificial Sequence
  Description of Artificial Sequence: Synthetic oligonucleotide
aaauaaugaaucuucgggugu

SEQ ID NO: 2933 - RNA, 21 nt, Artificial Sequence
  Description of Artificial Sequence: Synthetic oligonucleotide
aauaaugaaucuucggguguu

SEQ ID NO: 2934 - RNA, 21 nt, Artificial Sequence
  Description of Artificial Sequence: Synthetic oligonucleotide
auaaugaaucuucggguguuu

SEQ ID NO: 2935 - RNA, 21 nt, Artificial Sequence
  Description of Artificial Sequence: Synthetic oligonucleotide
uaaugaaucuucggguguuuu

SEQ ID NO: 2936 - RNA, 21 nt, Artificial Sequence
  Description of Artificial Sequence: Synthetic oligonucleotide
ugaaucuucggguguuucccu

SEQ ID NO: 2937 - RNA, 21 nt, Artificial Sequence
  Description of Artificial Sequence: Synthetic oligonucleotide
gaaucuucggguguuucccuu

SEQ ID NO: 2938 - RNA, 21 nt, Artificial Sequence
  Description of Artificial Sequence: Synthetic oligonucleotide
aagcacagaucuaccuugguu

SEQ ID NO: 2939 - RNA, 21 nt, Artificial Sequence
  Description of Artificial Sequence: Synthetic oligonucleotide
agcacagaucuaccuuggugu

SEQ ID NO: 2940 - RNA, 21 nt, Artificial Sequence
  Description of Artificial Sequence: Synthetic oligonucleotide
gcacagaucuaccuuggugau

SEQ ID NO: 2941 - RNA, 21 nt, Artificial Sequence
  Description of Artificial Sequence: Synthetic oligonucleotide
agaucuaccuuggugauuugu

SEQ ID NO: 2942 - RNA, 21 nt, Artificial Sequence
  Description of Artificial Sequence: Synthetic oligonucleotide
acaacugcuguggcugguugu

SEQ ID NO: 2943 - RNA, 21 nt, Artificial Sequence
  Description of Artificial Sequence: Synthetic oligonucleotide
caacugcuguggcugguuggu

SEQ ID NO: 2944 - RNA, 21 nt, Artificial Sequence
  Description of Artificial Sequence: Synthetic oligonucleotide
cugcuguggcugguuggugcu

SEQ ID NO: 2945 - RNA, 21 nt, Artificial Sequence
  Description of Artificial Sequence: Synthetic oligonucleotide
guggcugguuggugcuuuguu

SEQ ID NO: 2946 - RNA, 21 nt, Artificial Sequence
  Description of Artificial Sequence: Synthetic oligonucleotide
ggcugguuggugcuuuguuuu

SEQ ID NO: 2947 - RNA, 21 nt, Artificial Sequence
  Description of Artificial Sequence: Synthetic oligonucleotide
gcugguuggugcuuuguuuau

SEQ ID NO: 2948 - RNA, 21 nt, Artificial Sequence
  Description of Artificial Sequence: Synthetic oligonucleotide
cugguuggugcuuuguuuauu

SEQ ID NO: 2949 - RNA, 21 nt, Artificial Sequence
  Description of Artificial Sequence: Synthetic oligonucleotide
ugguuggugcuuuguuuaugu

SEQ ID NO: 2950 - RNA, 21 nt, Artificial Sequence
  Description of Artificial Sequence: Synthetic oligonucleotide
gguuggugcuuuguuuauggu

SEQ ID NO: 2951 - RNA, 21 nt, Artificial Sequence
  Description of Artificial Sequence: Synthetic oligonucleotide
guuggugcuuuguuuaugguu

SEQ ID NO: 2952 - RNA, 21 nt, Artificial Sequence
  Description of Artificial Sequence: Synthetic oligonucleotide
uuggugcuuuguuuaugguau

SEQ ID NO: 2953 - RNA, 21 nt, Artificial Sequence
  Description of Artificial Sequence: Synthetic oligonucleotide
uggugcuuuguuuaugguagu

SEQ ID NO: 2954 - RNA, 21 nt, Artificial Sequence
  Description of Artificial Sequence: Synthetic oligonucleotide
ugcuuuguuuaugguaguagu

SEQ ID NO: 2955 - RNA, 21 nt, Artificial Sequence
  Description of Artificial Sequence: Synthetic oligonucleotide
uuuguuuaugguaguaguuuu

SEQ ID NO: 2956 - RNA, 21 nt, Artificial Sequence
  Description of Artificial Sequence: Synthetic oligonucleotide
uuguuuaugguaguaguuuuu

SEQ ID NO: 2957 - RNA, 21 nt, Artificial Sequence
  Description of Artificial Sequence: Synthetic oligonucleotide
guuuaugguaguaguuuuucu

SEQ ID NO: 2958 - RNA, 21 nt, Artificial Sequence
  Description of Artificial Sequence: Synthetic oligonucleotide
uuuaugguaguaguuuuucuu

SEQ ID NO: 2959 - RNA, 21 nt, Artificial Sequence
  Description of Artificial Sequence: Synthetic oligonucleotide
uuaugguaguaguuuuucugu

SEQ ID NO: 2960 - RNA, 21 nt, Artificial Sequence
  Description of Artificial Sequence: Synthetic oligonucleotide
uaugguaguaguuuuucuguu

SEQ ID NO: 2961 - RNA, 21 nt, Artificial Sequence
  Description of Artificial Sequence: Synthetic oligonucleotide
augguaguaguuuuucuguau

SEQ ID NO: 2962 - RNA, 21 nt, Artificial Sequence
  Description of Artificial Sequence: Synthetic oligonucleotide
uaguaguuuuucuguaacacu

SEQ ID NO: 2963 - RNA, 21 nt, Artificial Sequence
  Description of Artificial Sequence: Synthetic oligonucleotide
agaauaaaguaccuugacuuu

SEQ ID NO: 2964 - RNA, 21 nt, Artificial Sequence
  Description of Artificial Sequence: Synthetic oligonucleotide
aauaaaguaccuugacuuugu

SEQ ID NO: 2965 - RNA, 21 nt, Artificial Sequence
  Description of Artificial Sequence: Synthetic oligonucleotide
auaaaguaccuugacuuuguu

SEQ ID NO: 2966 - RNA, 21 nt, Artificial Sequence
  Description of Artificial Sequence: Synthetic oligonucleotide
uaaaguaccuugacuuuguuu

SEQ ID NO: 2967 - RNA, 21 nt, Artificial Sequence
  Description of Artificial Sequence: Synthetic oligonucleotide
aaaguaccuugacuuuguucu

SEQ ID NO: 2968 - RNA, 21 nt, Artificial Sequence
  Description of Artificial Sequence: Synthetic oligonucleotide
aaguaccuugacuuuguucau

SEQ ID NO: 2969 - RNA, 21 nt, Artificial Sequence
  Description of Artificial Sequence: Synthetic oligonucleotide
uaccuugacuuuguucacagu

SEQ ID NO: 2970 - RNA, 21 nt, Artificial Sequence
  Description of Artificial Sequence: Synthetic oligonucleotide
acuuuguucacagcauguagu

SEQ ID NO: 2971 - RNA, 21 nt, Artificial Sequence
  Description of Artificial Sequence: Synthetic oligonucleotide
cuuuguucacagcauguaggu

SEQ ID NO: 2972 - RNA, 21 nt, Artificial Sequence
  Description of Artificial Sequence: Synthetic oligonucleotide
uuuguucacagcauguagggu

SEQ ID NO: 2973 - RNA, 21 nt, Artificial Sequence
  Description of Artificial Sequence: Synthetic oligonucleotide
uuguucacagcauguaggguu

SEQ ID NO: 2974 - RNA, 21 nt, Artificial Sequence
  Description of Artificial Sequence: Synthetic oligonucleotide
uguucacagcauguagggugu

SEQ ID NO: 2975 - RNA, 21 nt, Artificial Sequence
  Description of Artificial Sequence: Synthetic oligonucleotide
ucacagcauguagggugaugu

SEQ ID NO: 2976 - RNA, 21 nt, Artificial Sequence
  Description of Artificial Sequence: Synthetic oligonucleotide
caacggaccugagcacuggcu

SEQ ID NO: 2977 - RNA, 21 nt, Artificial Sequence
  Description of Artificial Sequence: Synthetic oligonucleotide
acggaccugagcacuggcauu

SEQ ID NO: 2978 - RNA, 21 nt, Artificial Sequence
  Description of Artificial Sequence: Synthetic oligonucleotide
ccugagcacuggcauaaggau

SEQ ID NO: 2979 - RNA, 21 nt, Artificial Sequence
  Description of Artificial Sequence: Synthetic oligonucleotide
cugagcacuggcauaaggacu

SEQ ID NO: 2980 - RNA, 21 nt, Artificial Sequence
  Description of Artificial Sequence: Synthetic oligonucleotide
ugagcacuggcauaaggacuu

SEQ ID NO: 2981 - RNA, 21 nt, Artificial Sequence
  Description of Artificial Sequence: Synthetic oligonucleotide
gcacuggcauaaggacuuccu

SEQ ID NO: 2982 - RNA, 21 nt, Artificial Sequence
  Description of Artificial Sequence: Synthetic oligonucleotide
gacuaaaaugcugcuuuuaau

SEQ ID NO: 2983 - RNA, 21 nt, Artificial Sequence
  Description of Artificial Sequence: Synthetic oligonucleotide
acuaaaaugcugcuuuuaaau

SEQ ID NO: 2984 - RNA, 21 nt, Artificial Sequence
  Description of Artificial Sequence: Synthetic oligonucleotide
cuaaaaugcugcuuuuaaaau

SEQ ID NO: 2985 - RNA, 21 nt, Artificial Sequence
  Description of Artificial Sequence: Synthetic oligonucleotide
uaaaaugcugcuuuuaaaacu

SEQ ID NO: 2986 - RNA, 21 nt, Artificial Sequence
  Description of Artificial Sequence: Synthetic oligonucleotide
ugcugcuuuuaaaacauaggu

SEQ ID NO: 2987 - RNA, 21 nt, Artificial Sequence
  Description of Artificial Sequence: Synthetic oligonucleotide
gcugcuuuuaaaacauaggau

SEQ ID NO: 2988 - RNA, 21 nt, Artificial Sequence
  Description of Artificial Sequence: Synthetic oligonucleotide
uuuaaaacauaggaaaguagu

SEQ ID NO: 2989 - RNA, 21 nt, Artificial Sequence
  Description of Artificial Sequence: Synthetic oligonucleotide
cuguugacaucgacacucauu

SEQ ID NO: 2990 - RNA, 21 nt, Artificial Sequence
  Description of Artificial Sequence: Synthetic oligonucleotide
guugacaucgacacucauacu

SEQ ID NO: 2991 - RNA, 21 nt, Artificial Sequence
  Description of Artificial Sequence: Synthetic oligonucleotide
gacaucgacacucauacagcu

SEQ ID NO: 2992 - RNA, 21 nt, Artificial Sequence
  Description of Artificial Sequence: Synthetic oligonucleotide
acaucgacacucauacagccu

SEQ ID NO: 2993 - RNA, 21 nt, Artificial Sequence
  Description of Artificial Sequence: Synthetic oligonucleotide
aucgacacucauacagccaau

SEQ ID NO: 2994 - RNA, 21 nt, Artificial Sequence
  Description of Artificial Sequence: Synthetic oligonucleotide
acacucauacagccaaguauu

SEQ ID NO: 2995 - RNA, 21 nt, Artificial Sequence
  Description of Artificial Sequence: Synthetic oligonucleotide
cucauacagccaaguaugacu

SEQ ID NO: 2996 - RNA, 21 nt, Artificial Sequence
  Description of Artificial Sequence: Synthetic oligonucleotide
ucauacagccaaguaugaccu

SEQ ID NO: 2997 - RNA, 21 nt, Artificial Sequence
  Description of Artificial Sequence: Synthetic oligonucleotide
cauacagccaaguaugacccu

SEQ ID NO: 2998 - RNA, 21 nt, Artificial Sequence
  Description of Artificial Sequence: Synthetic oligonucleotide
uacagccaaguaugacccuuu

SEQ ID NO: 2999 - RNA, 21 nt, Artificial Sequence
  Description of Artificial Sequence: Synthetic oligonucleotide
gccaaguaugacccuucccuu

SEQ ID NO: 3000 - RNA, 21 nt, Artificial Sequence
  Description of Artificial Sequence: Synthetic oligonucleotide
gauaaauugagcuaguuaagu

SEQ ID NO: 3001 - RNA, 21 nt, Artificial Sequence
  Description of Artificial Sequence: Synthetic oligonucleotide
auaaauugagcuaguuaaggu

SEQ ID NO: 3002 - RNA, 21 nt, Artificial Sequence
  Description of Artificial Sequence: Synthetic oligonucleotide
uaaauugagcuaguuaaggcu

SEQ ID NO: 3003 - RNA, 21 nt, Artificial Sequence
  Description of Artificial Sequence: Synthetic oligonucleotide
guaugacccuucccugaagcu

SEQ ID NO: 3004 - RNA, 21 nt, Artificial Sequence
  Description of Artificial Sequence: Synthetic oligonucleotide
cugucuguuuccuaugaucau

SEQ ID NO: 3005 - RNA, 21 nt, Artificial Sequence
  Description of Artificial Sequence: Synthetic oligonucleotide
gucuguuuccuaugaucaagu

SEQ ID NO: 3006 - RNA, 21 nt, Artificial Sequence
  Description of Artificial Sequence: Synthetic oligonucleotide
ucuguuuccuaugaucaagcu

SEQ ID NO: 3007 - RNA, 21 nt, Artificial Sequence
  Description of Artificial Sequence: Synthetic oligonucleotide
uguuuccuaugaucaagcaau

SEQ ID NO: 3008 - RNA, 21 nt, Artificial Sequence
  Description of Artificial Sequence: Synthetic oligonucleotide
guuuccuaugaucaagcaacu

SEQ ID NO: 3009 - RNA, 21 nt, Artificial Sequence
  Description of Artificial Sequence: Synthetic oligonucleotide
uccuaugaucaagcaacuucu

SEQ ID NO: 3010 - RNA, 21 nt, Artificial Sequence
  Description of Artificial Sequence: Synthetic oligonucleotide
agcuaguuaaggcaaaucagu

SEQ ID NO: 3011 - RNA, 21 nt, Artificial Sequence
  Description of Artificial Sequence: Synthetic oligonucleotide
gcuaguuaaggcaaaucaggu

SEQ ID NO: 3012 - RNA, 21 nt, Artificial Sequence
  Description of Artificial Sequence: Synthetic oligonucleotide
uaaggcaaaucagguaaaauu

SEQ ID NO: 3013 - RNA, 21 nt, Artificial Sequence
  Description of Artificial Sequence: Synthetic oligonucleotide
aggcaaaucagguaaaauagu

SEQ ID NO: 3014 - RNA, 21 nt, Artificial Sequence
  Description of Artificial Sequence: Synthetic oligonucleotide
ggcaaaucagguaaaauaguu

SEQ ID NO: 3015 - RNA, 21 nt, Artificial Sequence
  Description of Artificial Sequence: Synthetic oligonucleotide
gcaaaucagguaaaauagucu

SEQ ID NO: 3016 - RNA, 21 nt, Artificial Sequence
  Description of Artificial Sequence: Synthetic oligonucleotide
guaaaauagucaugauucuau

SEQ ID NO: 3017 - RNA, 21 nt, Artificial Sequence
  Description of Artificial Sequence: Synthetic oligonucleotide
uaaaauagucaugauucuauu

SEQ ID NO: 3018 - RNA, 21 nt, Artificial Sequence
  Description of Artificial Sequence: Synthetic oligonucleotide
aaaauagucaugauucuaugu

SEQ ID NO: 3019 - RNA, 21 nt, Artificial Sequence
  Description of Artificial Sequence: Synthetic oligonucleotide
agucaugauucuauguaaugu

SEQ ID NO: 3020 - RNA, 21 nt, Artificial Sequence
  Description of Artificial Sequence: Synthetic oligonucleotide
gucaugauucuauguaauguu

SEQ ID NO: 3021 - RNA, 21 nt, Artificial Sequence
  Description of Artificial Sequence: Synthetic oligonucleotide
ucaugauucuauguaauguau

SEQ ID NO: 3022 - RNA, 21 nt, Artificial Sequence
  Description of Artificial Sequence: Synthetic oligonucleotide
cccugaggauccucaacaauu

SEQ ID NO: 3023 - RNA, 21 nt, Artificial Sequence
  Description of Artificial Sequence: Synthetic oligonucleotide
ccugaggauccucaacaaugu

SEQ ID NO: 3024 - RNA, 21 nt, Artificial Sequence
  Description of Artificial Sequence: Synthetic oligonucleotide
gaggauccucaacaauggucu

SEQ ID NO: 3025 - RNA, 21 nt, Artificial Sequence
  Description of Artificial Sequence: Synthetic oligonucleotide
aggauccucaacaauggucau

SEQ ID NO: 3026 - RNA, 21 nt, Artificial Sequence
  Description of Artificial Sequence: Synthetic oligonucleotide
ugcuuucaacguggaguuugu

SEQ ID NO: 3027 - RNA, 21 nt, Artificial Sequence
  Description of Artificial Sequence: Synthetic oligonucleotide
uucaacguggaguuugaugau

SEQ ID NO: 3028 - RNA, 21 nt, Artificial Sequence
  Description of Artificial Sequence: Synthetic oligonucleotide
caacguggaguuugaugacuu

SEQ ID NO: 3029 - RNA, 21 nt, Artificial Sequence
  Description of Artificial Sequence: Synthetic oligonucleotide
aacguggaguuugaugacucu

SEQ ID NO: 3030 - RNA, 21 nt, Artificial Sequence
  Description of Artificial Sequence: Synthetic oligonucleotide
cguggaguuugaugacucucu

SEQ ID NO: 3031 - RNA, 21 nt, Artificial Sequence
  Description of Artificial Sequence: Synthetic oligonucleotide
uggaguuugaugacucucagu

SEQ ID NO: 3032 - RNA, 21 nt, Artificial Sequence
  Description of Artificial Sequence: Synthetic oligonucleotide
gaguuugaugacucucaggau

SEQ ID NO: 3033 - RNA, 21 nt, Artificial Sequence
  Description of Artificial Sequence: Synthetic oligonucleotide
guuugaugacucucaggacau

SEQ ID NO: 3034 - RNA, 21 nt, Artificial Sequence
  Description of Artificial Sequence: Synthetic oligonucleotide
ugaugacucucaggacaaagu

SEQ ID NO: 3035 - RNA, 21 nt, Artificial Sequence
  Description of Artificial Sequence: Synthetic oligonucleotide
uaauuagaguugugauacagu

SEQ ID NO: 3036 - RNA, 21 nt, Artificial Sequence
  Description of Artificial Sequence: Synthetic oligonucleotide
guugugauacagaguauauuu

SEQ ID NO: 3037 - RNA, 21 nt, Artificial Sequence
  Description of Artificial Sequence: Synthetic oligonucleotide
uugugauacagaguauauuuu

SEQ ID NO: 3038 - RNA, 21 nt, Artificial Sequence
  Description of Artificial Sequence: Synthetic oligonucleotide
ugugauacagaguauauuucu

SEQ ID NO: 3039 - RNA, 21 nt, Artificial Sequence
  Description of Artificial Sequence: Synthetic oligonucleotide
augacucucaggacaaagcau

SEQ ID NO: 3040 - RNA, 21 nt, Artificial Sequence
  Description of Artificial Sequence: Synthetic oligonucleotide
ugacucucaggacaaagcagu

SEQ ID NO: 3041 - RNA, 21 nt, Artificial Sequence
  Description of Artificial Sequence: Synthetic oligonucleotide
ccauucagacaauauaucauu

SEQ ID NO: 3042 - RNA, 21 nt, Artificial Sequence
  Description of Artificial Sequence: Synthetic oligonucleotide
acuucacuugguucacuggau

SEQ ID NO: 3043 - RNA, 21 nt, Artificial Sequence
  Description of Artificial Sequence: Synthetic oligonucleotide
uucacuugguucacuggaacu

SEQ ID NO: 3044 - RNA, 21 nt, Artificial Sequence
  Description of Artificial Sequence: Synthetic oligonucleotide
gauuuugggaaagcugugcau

SEQ ID NO: 3045 - RNA, 21 nt, Artificial Sequence
  Description of Artificial Sequence: Synthetic oligonucleotide
uuuugggaaagcugugcagcu

SEQ ID NO: 3046 - RNA, 21 nt, Artificial Sequence
  Description of Artificial Sequence: Synthetic oligonucleotide
ugggaaagcugugcagcaacu

SEQ ID NO: 3047 - RNA, 21 nt, Artificial Sequence
  Description of Artificial Sequence: Synthetic oligonucleotide
uggacuggccguucuagguau

SEQ ID NO: 3048 - RNA, 21 nt, Artificial Sequence
  Description of Artificial Sequence: Synthetic oligonucleotide
ggacuggccguucuagguauu

SEQ ID NO: 3049 - RNA, 21 nt, Artificial Sequence
  Description of Artificial Sequence: Synthetic oligonucleotide
uagguauuuuuuugaagguuu

SEQ ID NO: 3050 - RNA, 21 nt, Artificial Sequence
  Description of Artificial Sequence: Synthetic oligonucleotide
uauuuuuuugaagguuggcau

SEQ ID NO: 3051 - RNA, 21 nt, Artificial Sequence
  Description of Artificial Sequence: Synthetic oligonucleotide
auuuuuuugaagguuggcagu

SEQ ID NO: 3052 - RNA, 21 nt, Artificial Sequence
  Description of Artificial Sequence: Synthetic oligonucleotide
uuuugaagguuggcagcgcuu

SEQ ID NO: 3053 - RNA, 21 nt, Artificial Sequence
  Description of Artificial Sequence: Synthetic oligonucleotide
aagguuggcagcgcuaaaccu

SEQ ID NO: 3054 - RNA, 21 nt, Artificial Sequence
  Description of Artificial Sequence: Synthetic oligonucleotide
cuucagaaaguuguugauguu

SEQ ID NO: 3055 - RNA, 21 nt, Artificial Sequence
  Description of Artificial Sequence: Synthetic oligonucleotide
ucagaaaguuguugaugugcu

SEQ ID NO: 3056 - RNA, 21 nt, Artificial Sequence
  Description of Artificial Sequence: Synthetic oligonucleotide
cagaaaguuguugaugugcuu

SEQ ID NO: 3057 - RNA, 21 nt, Artificial Sequence
  Description of Artificial Sequence: Synthetic oligonucleotide
gaaaguuguugaugugcuggu

SEQ ID NO: 3058 - RNA, 21 nt, Artificial Sequence
  Description of Artificial Sequence: Synthetic oligonucleotide
auuccauuaaaacaaagggcu

SEQ ID NO: 3059 - RNA, 21 nt, Artificial Sequence
  Description of Artificial Sequence: Synthetic oligonucleotide
uuccauuaaaacaaagggcau

SEQ ID NO: 3060 - RNA, 21 nt, Artificial Sequence
  Description of Artificial Sequence: Synthetic oligonucleotide
uuaaaacaaagggcaagaguu

SEQ ID NO: 3061 - RNA, 21 nt, Artificial Sequence
  Description of Artificial Sequence: Synthetic oligonucleotide
uaaaacaaagggcaagagugu

SEQ ID NO: 3062 - RNA, 21 nt, Artificial Sequence
  Description of Artificial Sequence: Synthetic oligonucleotide
aaacaaagggcaagagugcuu

SEQ ID NO: 3063 - RNA, 21 nt, Artificial Sequence
  Description of Artificial Sequence: Synthetic oligonucleotide
acaaagggcaagagugcugau

SEQ ID NO: 3064 - RNA, 21 nt, Artificial Sequence
  Description of Artificial Sequence: Synthetic oligonucleotide
aagggcaagagugcugacuuu

SEQ ID NO: 3065 - RNA, 21 nt, Artificial Sequence
  Description of Artificial Sequence: Synthetic oligonucleotide
gggcaagagugcugacuucau

SEQ ID NO: 3066 - RNA, 21 nt, Artificial Sequence
  Description of Artificial Sequence: Synthetic oligonucleotide
gcaagagugcugacuucacuu

SEQ ID NO: 3067 - RNA, 21 nt, Artificial Sequence
  Description of Artificial Sequence: Synthetic oligonucleotide
caagagugcugacuucacuau

SEQ ID NO: 3068 - RNA, 21 nt, Artificial Sequence
  Description of Artificial Sequence: Synthetic oligonucleotide
agagugcugacuucacuaacu

SEQ ID NO: 3069 - RNA, 21 nt, Artificial Sequence
  Description of Artificial Sequence: Synthetic oligonucleotide
gugcugacuucacuaacuucu

SEQ ID NO: 3070 - RNA, 21 nt, Artificial Sequence
  Description of Artificial Sequence: Synthetic oligonucleotide
ugcugacuucacuaacuucgu

SEQ ID NO: 3071 - RNA, 21 nt, Artificial Sequence
  Description of Artificial Sequence: Synthetic oligonucleotide
cuucacuaacuucgauccucu

SEQ ID NO: 3072 - RNA, 21 nt, Artificial Sequence
  Description of Artificial Sequence: Synthetic oligonucleotide
uucacuaacuucgauccucgu

SEQ ID NO: 3073 - RNA, 21 nt, Artificial Sequence
  Description of Artificial Sequence: Synthetic oligonucleotide
gccuccuuccugaauccuugu

SEQ ID NO: 3074 - RNA, 21 nt, Artificial Sequence
  Description of Artificial Sequence: Synthetic oligonucleotide
uccuuccugaauccuuggauu

SEQ ID NO: 3075 - RNA, 21 nt, Artificial Sequence
  Description of Artificial Sequence: Synthetic oligonucleotide
ggaccuacccaggcucacugu

SEQ ID NO: 3076 - RNA, 21 nt, Artificial Sequence
  Description of Artificial Sequence: Synthetic oligonucleotide
accuacccaggcucacugacu

SEQ ID NO: 3077 - RNA, 21 nt, Artificial Sequence
  Description of Artificial Sequence: Synthetic oligonucleotide
cuacccaggcucacugaccau

SEQ ID NO: 3078 - RNA, 21 nt, Artificial Sequence
  Description of Artificial Sequence: Synthetic oligonucleotide
acccaggcucacugaccaccu

SEQ ID NO: 3079 - RNA, 21 nt, Artificial Sequence
  Description of Artificial Sequence: Synthetic oligonucleotide
cuccucuucuggaaugugugu

SEQ ID NO: 3080 - RNA, 21 nt, Artificial Sequence
  Description of Artificial Sequence: Synthetic oligonucleotide
ccucuucuggaaugugugacu

SEQ ID NO: 3081 - RNA, 21 nt, Artificial Sequence
  Description of Artificial Sequence: Synthetic oligonucleotide
ucuucuggaaugugugaccuu

SEQ ID NO: 3082 - RNA, 21 nt, Artificial Sequence
  Description of Artificial Sequence: Synthetic oligonucleotide
uucuggaaugugugaccuggu

SEQ ID NO: 3083 - RNA, 21 nt, Artificial Sequence
  Description of Artificial Sequence: Synthetic oligonucleotide
uggaaugugugaccuggauuu

SEQ ID NO: 3084 - RNA, 21 nt, Artificial Sequence
  Description of Artificial Sequence: Synthetic oligonucleotide
ugugugaccuggauugugcuu

SEQ ID NO: 3085 - RNA, 21 nt, Artificial Sequence
  Description of Artificial Sequence: Synthetic oligonucleotide
ugugaccuggauugugcucau

SEQ ID NO: 3086 - RNA, 21 nt, Artificial Sequence
  Description of Artificial Sequence: Synthetic oligonucleotide
gaccuggauugugcucaaggu

SEQ ID NO: 3087 - RNA, 21 nt, Artificial Sequence
  Description of Artificial Sequence: Synthetic oligonucleotide
ccuggauugugcucaaggaau

SEQ ID NO: 3088 - RNA, 21 nt, Artificial Sequence
  Description of Artificial Sequence: Synthetic oligonucleotide
cuggauugugcucaaggaacu

SEQ ID NO: 3089 - RNA, 21 nt, Artificial Sequence
  Description of Artificial Sequence: Synthetic oligonucleotide
gauugugcucaaggaacccau

SEQ ID NO: 3090 - RNA, 21 nt, Artificial Sequence
  Description of Artificial Sequence: Synthetic oligonucleotide
auugugcucaaggaacccauu

SEQ ID NO: 3091 - RNA, 21 nt, Artificial Sequence
  Description of Artificial Sequence: Synthetic oligonucleotide
ugcucaaggaacccaucagcu

SEQ ID NO: 3092 - RNA, 21 nt, Artificial Sequence
  Description of Artificial Sequence: Synthetic oligonucleotide
gcucaaggaacccaucagcgu

SEQ ID NO: 3093 - RNA, 21 nt, Artificial Sequence
  Description of Artificial Sequence: Synthetic oligonucleotide
ucaaggaacccaucagcgucu

SEQ ID NO: 3094 - RNA, 21 nt, Artificial Sequence
  Description of Artificial Sequence: Synthetic oligonucleotide
ggaacccaucagcgucagcau

SEQ ID NO: 3095 - RNA, 21 nt, Artificial Sequence
  Description of Artificial Sequence: Synthetic oligonucleotide
aacccaucagcgucagcagcu

SEQ ID NO: 3096 - RNA, 21 nt, Artificial Sequence
  Description of Artificial Sequence: Synthetic oligonucleotide
uugaaauuccguaaacuuaau

SEQ ID NO: 3097 - RNA, 21 nt, Artificial Sequence
  Description of Artificial Sequence: Synthetic oligonucleotide
gaaauuccguaaacuuaacuu

SEQ ID NO: 3098 - RNA, 21 nt, Artificial Sequence
  Description of Artificial Sequence: Synthetic oligonucleotide
aauuccguaaacuuaacuucu

SEQ ID NO: 3099 - RNA, 21 nt, Artificial Sequence
  Description of Artificial Sequence: Synthetic oligonucleotide
auuccguaaacuuaacuucau

SEQ ID NO: 3100 - RNA, 21 nt, Artificial Sequence
  Description of Artificial Sequence: Synthetic oligonucleotide
uccguaaacuuaacuucaauu

SEQ ID NO: 3101 - RNA, 21 nt, Artificial Sequence
  Description of Artificial Sequence: Synthetic oligonucleotide
ccguaaacuuaacuucaaugu

SEQ ID NO: 3102 - RNA, 21 nt, Artificial Sequence
  Description of Artificial Sequence: Synthetic oligonucleotide
cgaagaacugaugguggacau

SEQ ID NO: 3103 - RNA, 21 nt, Artificial Sequence
  Description of Artificial Sequence: Synthetic oligonucleotide
agaacugaugguggacaacuu

SEQ ID NO: 3104 - RNA, 21 nt, Artificial Sequence
  Description of Artificial Sequence: Synthetic oligonucleotide
aacugaugguggacaacuggu

SEQ ID NO: 3105 - RNA, 21 nt, Artificial Sequence
  Description of Artificial Sequence: Synthetic oligonucleotide
acugaugguggacaacuggcu

SEQ ID NO: 3106 - RNA, 21 nt, Artificial Sequence
  Description of Artificial Sequence: Synthetic oligonucleotide
ugaugguggacaacuggcgcu

SEQ ID NO: 3107 - RNA, 21 nt, Artificial Sequence
  Description of Artificial Sequence: Synthetic oligonucleotide
cagcucagccacugaagaacu

SEQ ID NO: 3108 - RNA, 21 nt, Artificial Sequence
  Description of Artificial Sequence: Synthetic oligonucleotide
agcucagccacugaagaacau

SEQ ID NO: 3109 - RNA, 21 nt, Artificial Sequence
  Description of Artificial Sequence: Synthetic oligonucleotide
cucagccacugaagaacaggu

SEQ ID NO: 3110 - RNA, 21 nt, Artificial Sequence
  Description of Artificial Sequence: Synthetic oligonucleotide
ucagccacugaagaacaggcu

SEQ ID NO: 3111 - RNA, 21 nt, Artificial Sequence
  Description of Artificial Sequence: Synthetic oligonucleotide
agccacugaagaacaggcaau

SEQ ID NO: 3112 - RNA, 21 nt, Artificial Sequence
  Description of Artificial Sequence: Synthetic oligonucleotide
acugaagaacaggcaaaucau

SEQ ID NO: 3113 - RNA, 21 nt, Artificial Sequence
  Description of Artificial Sequence: Synthetic oligonucleotide
cugaagaacaggcaaaucaau

SEQ ID NO: 3114 - RNA, 21 nt, Artificial Sequence
  Description of Artificial Sequence: Synthetic oligonucleotide
ugaagaacaggcaaaucaaau

SEQ ID NO: 3115 - RNA, 21 nt, Artificial Sequence
  Description of Artificial Sequence: Synthetic oligonucleotide
gaagaacaggcaaaucaaagu

SEQ ID NO: 3116 - RNA, 21 nt, Artificial Sequence
  Description of Artificial Sequence: Synthetic oligonucleotide
agaacaggcaaaucaaagcuu

SEQ ID NO: 3117 - RNA, 21 nt, Artificial Sequence
  Description of Artificial Sequence: Synthetic oligonucleotide
gaacaggcaaaucaaagcuuu

SEQ ID NO: 3118 - RNA, 21 nt, Artificial Sequence
  Description of Artificial Sequence: Synthetic oligonucleotide
aacaggcaaaucaaagcuucu

SEQ ID NO: 3119 - RNA, 21 nt, Artificial Sequence
  Description of Artificial Sequence: Synthetic oligonucleotide
aggcaaaucaaagcuuccuuu

SEQ ID NO: 3120 - RNA, 21 nt, Artificial Sequence
  Description of Artificial Sequence: Synthetic oligonucleotide
ggcaaaucaaagcuuccuucu

SEQ ID NO: 3121 - RNA, 21 nt, Artificial Sequence
  Description of Artificial Sequence: Synthetic oligonucleotide
aaaucaaagcuuccuucaaau

SEQ ID NO: 3122 - RNA, 21 nt, Artificial Sequence
  Description of Artificial Sequence: Synthetic oligonucleotide
aaucaaagcuuccuucaaauu

SEQ ID NO: 3123 - RNA, 21 nt, Artificial Sequence
  Description of Artificial Sequence: Synthetic oligonucleotide
ucaaagcuuccuucaaauaau

SEQ ID NO: 3124 - RNA, 21 nt, Artificial Sequence
  Description of Artificial Sequence: Synthetic oligonucleotide
aaagcuuccuucaaauaagau

SEQ ID NO: 3125 - RNA, 21 nt, Artificial Sequence
  Description of Artificial Sequence: Synthetic oligonucleotide
aagcuuccuucaaauaagauu

SEQ ID NO: 3126 - RNA, 21 nt, Artificial Sequence
  Description of Artificial Sequence: Synthetic oligonucleotide
gcuuccuucaaauaagauggu

SEQ ID NO: 3127 - RNA, 21 nt, Artificial Sequence
  Description of Artificial Sequence: Synthetic oligonucleotide
uuccuucaaauaagauggucu

SEQ ID NO: 3128 - RNA, 21 nt, Artificial Sequence
  Description of Artificial Sequence: Synthetic oligonucleotide
uccuucaaauaagaugguccu

SEQ ID NO: 3129 - RNA, 21 nt, Artificial Sequence
  Description of Artificial Sequence: Synthetic oligonucleotide
uucaaauaagauggucccauu

SEQ ID NO: 3130 - RNA, 21 nt, Artificial Sequence
  Description of Artificial Sequence: Synthetic oligonucleotide
gucuguauccaaauaaugaau

SEQ ID NO: 3131 - RNA, 21 nt, Artificial Sequence
  Description of Artificial Sequence: Synthetic oligonucleotide
ucuguauccaaauaaugaauu

SEQ ID NO: 3132 - RNA, 21 nt, Artificial Sequence
  Description of Artificial Sequence: Synthetic oligonucleotide
cuguauccaaauaaugaaucu

SEQ ID NO: 3133 - RNA, 21 nt, Artificial Sequence
  Description of Artificial Sequence: Synthetic oligonucleotide
guauccaaauaaugaaucuuu

SEQ ID NO: 3134 - RNA, 21 nt, Artificial Sequence
  Description of Artificial Sequence: Synthetic oligonucleotide
uauccaaauaaugaaucuucu

SEQ ID NO: 3135 - RNA, 21 nt, Artificial Sequence
  Description of Artificial Sequence: Synthetic oligonucleotide
auccaaauaaugaaucuucgu

SEQ ID NO: 3136 - RNA, 21 nt, Artificial Sequence
  Description of Artificial Sequence: Synthetic oligonucleotide
aaugaaucuucggguguuucu

SEQ ID NO: 3137 - RNA, 21 nt, Artificial Sequence
  Description of Artificial Sequence: Synthetic oligonucleotide
ugaaucuucggguguuucccu

SEQ ID NO: 3138 - RNA, 21 nt, Artificial Sequence
  Description of Artificial Sequence: Synthetic oligonucleotide
uuagcuaagcacagaucuacu

SEQ ID NO: 3139 - RNA, 21 nt, Artificial Sequence
  Description of Artificial Sequence: Synthetic oligonucleotide
uagcuaagcacagaucuaccu

SEQ ID NO: 3140 - RNA, 21 nt, Artificial Sequence
  Description of Artificial Sequence: Synthetic oligonucleotide
gcuaagcacagaucuaccuuu

SEQ ID NO: 3141 - RNA, 21 nt, Artificial Sequence
  Description of Artificial Sequence: Synthetic oligonucleotide
cuaagcacagaucuaccuugu

SEQ ID NO: 3142 - RNA, 21 nt, Artificial Sequence
  Description of Artificial Sequence: Synthetic oligonucleotide
cagaucuaccuuggugauuuu

SEQ ID NO: 3143 - RNA, 21 nt, Artificial Sequence
  Description of Artificial Sequence: Synthetic oligonucleotide
aauaaaaugugaagacuagau

SEQ ID NO: 3144 - RNA, 21 nt, Artificial Sequence
  Description of Artificial Sequence: Synthetic oligonucleotide
acaacugcuguggcugguugu

SEQ ID NO: 3145 - RNA, 21 nt, Artificial Sequence
  Description of Artificial Sequence: Synthetic oligonucleotide
cuguggcugguuggugcuuuu

SEQ ID NO: 3146 - RNA, 21 nt, Artificial Sequence
  Description of Artificial Sequence: Synthetic oligonucleotide
uuggugcuuuguuuaugguau

SEQ ID NO: 3147 - RNA, 21 nt, Artificial Sequence
  Description of Artificial Sequence: Synthetic oligonucleotide
gcuuuguuuaugguaguaguu

SEQ ID NO: 3148 - RNA, 21 nt, Artificial Sequence
  Description of Artificial Sequence: Synthetic oligonucleotide
uuuguuuaugguaguaguuuu

SEQ ID NO: 3149 - RNA, 21 nt, Artificial Sequence
  Description of Artificial Sequence: Synthetic oligonucleotide
uuguuuaugguaguaguuuuu

SEQ ID NO: 3150 - RNA, 21 nt, Artificial Sequence
  Description of Artificial Sequence: Synthetic oligonucleotide
augguaguaguuuuucuguau

SEQ ID NO: 3151 - RNA, 21 nt, Artificial Sequence
  Description of Artificial Sequence: Synthetic oligonucleotide
gguaguaguuuuucuguaacu

SEQ ID NO: 3152 - RNA, 21 nt, Artificial Sequence
  Description of Artificial Sequence: Synthetic oligonucleotide
uaguaguuuuucuguaacacu

SEQ ID NO: 3153 - RNA, 21 nt, Artificial Sequence
  Description of Artificial Sequence: Synthetic oligonucleotide
aguaguuuuucuguaacacau

SEQ ID NO: 3154 - RNA, 21 nt, Artificial Sequence
  Description of Artificial Sequence: Synthetic oligonucleotide
guaguuuuucuguaacacagu

SEQ ID NO: 3155 - RNA, 21 nt, Artificial Sequence
  Description of Artificial Sequence: Synthetic oligonucleotide
aauaagaauaaaguaccuugu

SEQ ID NO: 3156 - RNA, 21 nt, Artificial Sequence
  Description of Artificial Sequence: Synthetic oligonucleotide
aagaauaaaguaccuugacuu

SEQ ID NO: 3157 - RNA, 21 nt, Artificial Sequence
  Description of Artificial Sequence: Synthetic oligonucleotide
agaauaaaguaccuugacuuu

SEQ ID NO: 3158 - RNA, 21 nt, Artificial Sequence
  Description of Artificial Sequence: Synthetic oligonucleotide
aauaaaguaccuugacuuugu

SEQ ID NO: 3159 - RNA, 21 nt, Artificial Sequence
  Description of Artificial Sequence: Synthetic oligonucleotide
aaguaccuugacuuuguucau

SEQ ID NO: 3160 - RNA, 21 nt, Artificial Sequence
  Description of Artificial Sequence: Synthetic oligonucleotide
guaccuugacuuuguucacau

SEQ ID NO: 3161 - RNA, 21 nt, Artificial Sequence
  Description of Artificial Sequence: Synthetic oligonucleotide
uaccuugacuuuguucacagu

SEQ ID NO: 3162 - RNA, 21 nt, Artificial Sequence
  Description of Artificial Sequence: Synthetic oligonucleotide
ccuugacuuuguucacagcau

SEQ ID NO: 3163 - RNA, 21 nt, Artificial Sequence
  Description of Artificial Sequence: Synthetic oligonucleotide
uugacuuuguucacagcaugu

SEQ ID NO: 3164 - RNA, 21 nt, Artificial Sequence
  Description of Artificial Sequence: Synthetic oligonucleotide
cuuuguucacagcauguaggu

SEQ ID NO: 3165 - RNA, 21 nt, Artificial Sequence
  Description of Artificial Sequence: Synthetic oligonucleotide
cacagcauguagggugaugau

SEQ ID NO: 3166 - RNA, 21 nt, Artificial Sequence
  Description of Artificial Sequence: Synthetic oligonucleotide
cagcauguagggugaugagcu

SEQ ID NO: 3167 - RNA, 21 nt, Artificial Sequence
  Description of Artificial Sequence: Synthetic oligonucleotide
agcauguagggugaugagcau

SEQ ID NO: 3168 - RNA, 21 nt, Artificial Sequence
  Description of Artificial Sequence: Synthetic oligonucleotide
cauguagggugaugagcacuu

SEQ ID NO: 3169 - RNA, 21 nt, Artificial Sequence
  Description of Artificial Sequence: Synthetic oligonucleotide
gacuaaaaugcugcuuuuaau

SEQ ID NO: 3170 - RNA, 21 nt, Artificial Sequence
  Description of Artificial Sequence: Synthetic oligonucleotide
aaaaugcugcuuuuaaaacau

SEQ ID NO: 3171 - RNA, 21 nt, Artificial Sequence
  Description of Artificial Sequence: Synthetic oligonucleotide
augcugcuuuuaaaacauagu

SEQ ID NO: 3172 - RNA, 21 nt, Artificial Sequence
  Description of Artificial Sequence: Synthetic oligonucleotide
gcugcuuuuaaaacauaggau

SEQ ID NO: 3173 - RNA, 21 nt, Artificial Sequence
  Description of Artificial Sequence: Synthetic oligonucleotide
cugcuuuuaaaacauaggaau

SEQ ID NO: 3174 - RNA, 21 nt, Artificial Sequence
  Description of Artificial Sequence: Synthetic oligonucleotide
ugcuuuuaaaacauaggaaau

SEQ ID NO: 3175 - RNA, 21 nt, Artificial Sequence
  Description of Artificial Sequence: Synthetic oligonucleotide
uuuuaaaacauaggaaaguau

SEQ ID NO: 3176 - RNA, 21 nt, Artificial Sequence
  Description of Artificial Sequence: Synthetic oligonucleotide
aaacauaggaaaguagaaugu

SEQ ID NO: 3177 - RNA, 21 nt, Artificial Sequence
  Description of Artificial Sequence: Synthetic oligonucleotide
uugagugcaaauccauagcau

SEQ ID NO: 3178 - RNA, 21 nt, Artificial Sequence
  Description of Artificial Sequence: Synthetic oligonucleotide
ugagugcaaauccauagcacu

SEQ ID NO: 3179 - RNA, 21 nt, Artificial Sequence
  Description of Artificial Sequence: Synthetic oligonucleotide
aagauaaauugagcuaguuau

SEQ ID NO: 3180 - RNA, 21 nt, Artificial Sequence
  Description of Artificial Sequence: Synthetic oligonucleotide
agauaaauugagcuaguuaau

SEQ ID NO: 3181 - RNA, 21 nt, Artificial Sequence
  Description of Artificial Sequence: Synthetic oligonucleotide
aaauugagcuaguuaaggcau

SEQ ID NO: 3182 - RNA, 21 nt, Artificial Sequence
  Description of Artificial Sequence: Synthetic oligonucleotide
aauugagcuaguuaaggcaau

SEQ ID NO: 3183 - RNA, 21 nt, Artificial Sequence
  Description of Artificial Sequence: Synthetic oligonucleotide
gagcuaguuaaggcaaaucau

SEQ ID NO: 3184 - RNA, 21 nt, Artificial Sequence
  Description of Artificial Sequence: Synthetic oligonucleotide
cuaguuaaggcaaaucagguu

SEQ ID NO: 3185 - RNA, 21 nt, Artificial Sequence
  Description of Artificial Sequence: Synthetic oligonucleotide
aguuaaggcaaaucagguaau

SEQ ID NO: 3186 - RNA, 21 nt, Artificial Sequence
  Description of Artificial Sequence: Synthetic oligonucleotide
uaaggcaaaucagguaaaauu

SEQ ID NO: 3187 - RNA, 21 nt, Artificial Sequence
  Description of Artificial Sequence: Synthetic oligonucleotide
aaggcaaaucagguaaaauau

SEQ ID NO: 3188 - RNA, 21 nt, Artificial Sequence
  Description of Artificial Sequence: Synthetic oligonucleotide
gcaaaucagguaaaauagucu

SEQ ID NO: 3189 - RNA, 21 nt, Artificial Sequence
  Description of Artificial Sequence: Synthetic oligonucleotide
caaaucagguaaaauagucau

SEQ ID NO: 3190 - RNA, 21 nt, Artificial Sequence
  Description of Artificial Sequence: Synthetic oligonucleotide
aaaucagguaaaauagucauu

SEQ ID NO: 3191 - RNA, 21 nt, Artificial Sequence
  Description of Artificial Sequence: Synthetic oligonucleotide
aucagguaaaauagucaugau

SEQ ID NO: 3192 - RNA, 21 nt, Artificial Sequence
  Description of Artificial Sequence: Synthetic oligonucleotide
cagguaaaauagucaugauuu

SEQ ID NO: 3193 - RNA, 21 nt, Artificial Sequence
  Description of Artificial Sequence: Synthetic oligonucleotide
agguaaaauagucaugauucu

SEQ ID NO: 3194 - RNA, 21 nt, Artificial Sequence
  Description of Artificial Sequence: Synthetic oligonucleotide
guaaaauagucaugauucuau

SEQ ID NO: 3195 - RNA, 21 nt, Artificial Sequence
  Description of Artificial Sequence: Synthetic oligonucleotide
uaaaauagucaugauucuauu

SEQ ID NO: 3196 - RNA, 21 nt, Artificial Sequence
  Description of Artificial Sequence: Synthetic oligonucleotide
ucaugauucuauguaauguau

SEQ ID NO: 3197 - RNA, 21 nt, Artificial Sequence
  Description of Artificial Sequence: Synthetic oligonucleotide
caugauucuauguaauguaau

SEQ ID NO: 3198 - RNA, 21 nt, Artificial Sequence
  Description of Artificial Sequence: Synthetic oligonucleotide
gauucuauguaauguaaaccu

SEQ ID NO: 3199 - RNA, 21 nt, Artificial Sequence
  Description of Artificial Sequence: Synthetic oligonucleotide
augacuuuugaauuacagagu

SEQ ID NO: 3200 - RNA, 21 nt, Artificial Sequence
  Description of Artificial Sequence: Synthetic oligonucleotide
gacuuuugaauuacagagauu

SEQ ID NO: 3201 - RNA, 21 nt, Artificial Sequence
  Description of Artificial Sequence: Synthetic oligonucleotide
uauaauuagaguugugauacu

SEQ ID NO: 3202 - RNA, 21 nt, Artificial Sequence
  Description of Artificial Sequence: Synthetic oligonucleotide
uaauuagaguugugauacagu

SEQ ID NO: 3203 - RNA, 21 nt, Artificial Sequence
  Description of Artificial Sequence: Synthetic oligonucleotide
aauuagaguugugauacagau

SEQ ID NO: 3204 - RNA, 21 nt, Artificial Sequence
  Description of Artificial Sequence: Synthetic oligonucleotide
auuagaguugugauacagagu

SEQ ID NO: 3205 - RNA, 21 nt, Artificial Sequence
  Description of Artificial Sequence: Synthetic oligonucleotide
uagaguugugauacagaguau

SEQ ID NO: 3206 - RNA, 21 nt, Artificial Sequence
  Description of Artificial Sequence: Synthetic oligonucleotide
gaguugugauacagaguauau

SEQ ID NO: 3207 - RNA, 21 nt, Artificial Sequence
  Description of Artificial Sequence: Synthetic oligonucleotide
guugugauacagaguauauuu

SEQ ID NO: 3208 - RNA, 21 nt, Artificial Sequence
  Description of Artificial Sequence: Synthetic oligonucleotide
cauucagacaauauaucauau

SEQ ID NO: 3209 - RNA, 21 nt, Artificial Sequence
  Description of Artificial Sequence: Synthetic oligonucleotide
auucagacaauauaucauaau

SEQ ID NO: 3210 - RNA, 23 nt, Artificial Sequence
  Description of Artificial Sequence: Synthetic oligonucleotide
accuuaugccagugcucaggucc

SEQ ID NO: 3211 - RNA, 23 nt, Artificial Sequence
  Description of Artificial Sequence: Synthetic oligonucleotide
aguccuuaugccagugcucaggu

SEQ ID NO: 3212 - RNA, 23 nt, Artificial Sequence
  Description of Artificial Sequence: Synthetic oligonucleotide
acuguaugagugucgaugucaac

SEQ ID NO: 3213 - RNA, 23 nt, Artificial Sequence
  Description of Artificial Sequence: Synthetic oligonucleotide
acauacuuggcuguaugaguguc

SEQ ID NO: 3214 - RNA, 23 nt, Artificial Sequence
  Description of Artificial Sequence: Synthetic oligonucleotide
aucauacuuggcuguaugagugu

SEQ ID NO: 3215 - RNA, 23 nt, Artificial Sequence
  Description of Artificial Sequence: Synthetic oligonucleotide
agucauacuuggcuguaugagug

SEQ ID NO: 3216 - RNA, 23 nt, Artificial Sequence
  Description of Artificial Sequence: Synthetic oligonucleotide
acagggaagggucauacuuggcu

SEQ ID NO: 3217 - RNA, 23 nt, Artificial Sequence
  Description of Artificial Sequence: Synthetic oligonucleotide
accauuguugaggauccucaggg

SEQ ID NO: 3218 - RNA, 23 nt, Artificial Sequence
  Description of Artificial Sequence: Synthetic oligonucleotide
aaccauuguugaggauccucagg

SEQ ID NO: 3219 - RNA, 23 nt, Artificial Sequence
  Description of Artificial Sequence: Synthetic oligonucleotide
agaccauuguugaggauccucag

SEQ ID NO: 3220 - RNA, 23 nt, Artificial Sequence
  Description of Artificial Sequence: Synthetic oligonucleotide
acaaacuccacguugaaagcaug

SEQ ID NO: 3221 - RNA, 23 nt, Artificial Sequence
  Description of Artificial Sequence: Synthetic oligonucleotide
aucaaacuccacguugaaagcau

SEQ ID NO: 3222 - RNA, 23 nt, Artificial Sequence
  Description of Artificial Sequence: Synthetic oligonucleotide
aaucaaacuccacguugaaagca

SEQ ID NO: 3223 - RNA, 23 nt, Artificial Sequence
  Description of Artificial Sequence: Synthetic oligonucleotide
acaucaaacuccacguugaaagc

SEQ ID NO: 3224 - RNA, 23 nt, Artificial Sequence
  Description of Artificial Sequence: Synthetic oligonucleotide
accugagagucaucaaacuccac

SEQ ID NO: 3225 - RNA, 23 nt, Artificial Sequence
  Description of Artificial Sequence: Synthetic oligonucleotide
acugcuuuguccugagagucauc

SEQ ID NO: 3226 - RNA, 23 nt, Artificial Sequence
  Description of Artificial Sequence: Synthetic oligonucleotide
accagugaaccaagugaaguucu

SEQ ID NO: 3227 - RNA, 23 nt, Artificial Sequence
  Description of Artificial Sequence: Synthetic oligonucleotide
auagaacggccaguccaucaggu

SEQ ID NO: 3228 - RNA, 23 nt, Artificial Sequence
  Description of Artificial Sequence: Synthetic oligonucleotide
acuagaacggccaguccaucagg

SEQ ID NO: 3229 - RNA, 23 nt, Artificial Sequence
  Description of Artificial Sequence: Synthetic oligonucleotide
accuagaacggccaguccaucag

SEQ ID NO: 3230 - RNA, 23 nt, Artificial Sequence
  Description of Artificial Sequence: Synthetic oligonucleotide
aaccuagaacggccaguccauca

SEQ ID NO: 3231 - RNA, 23 nt, Artificial Sequence
  Description of Artificial Sequence: Synthetic oligonucleotide
aaauaccuagaacggccagucca

SEQ ID NO: 3232 - RNA, 23 nt, Artificial Sequence
  Description of Artificial Sequence: Synthetic oligonucleotide
aaaauaccuagaacggccagucc

SEQ ID NO: 3233 - RNA, 23 nt, Artificial Sequence
  Description of Artificial Sequence: Synthetic oligonucleotide
aaaaauaccuagaacggccaguc

SEQ ID NO: 3234 - RNA, 23 nt, Artificial Sequence
  Description of Artificial Sequence: Synthetic oligonucleotide
aaaaaauaccuagaacggccagu

SEQ ID NO: 3235 - RNA, 23 nt, Artificial Sequence
  Description of Artificial Sequence: Synthetic oligonucleotide
aaaaaaauaccuagaacggccag

SEQ ID NO: 3236 - RNA, 23 nt, Artificial Sequence
  Description of Artificial Sequence: Synthetic oligonucleotide
aaaaaaaauaccuagaacggcca

SEQ ID NO: 3237 - RNA, 23 nt, Artificial Sequence
  Description of Artificial Sequence: Synthetic oligonucleotide
acaaaaaaauaccuagaacggcc

SEQ ID NO: 3238 - RNA, 23 nt, Artificial Sequence
  Description of Artificial Sequence: Synthetic oligonucleotide
aucaaaaaaauaccuagaacggc

SEQ ID NO: 3239 - RNA, 23 nt, Artificial Sequence
  Description of Artificial Sequence: Synthetic oligonucleotide
auucaaaaaaauaccuagaacgg

SEQ ID NO: 3240 - RNA, 23 nt, Artificial Sequence
  Description of Artificial Sequence: Synthetic oligonucleotide
acuucaaaaaaauaccuagaacg

SEQ ID NO: 3241 - RNA, 23 nt, Artificial Sequence
  Description of Artificial Sequence: Synthetic oligonucleotide
accuucaaaaaaauaccuagaac

SEQ ID NO: 3242 - RNA, 23 nt, Artificial Sequence
  Description of Artificial Sequence: Synthetic oligonucleotide
aaaccuucaaaaaaauaccuaga

SEQ ID NO: 3243 - RNA, 23 nt, Artificial Sequence
  Description of Artificial Sequence: Synthetic oligonucleotide
acaaccuucaaaaaaauaccuag

SEQ ID NO: 3244 - RNA, 23 nt, Artificial Sequence
  Description of Artificial Sequence: Synthetic oligonucleotide
accaaccuucaaaaaaauaccua

SEQ ID NO: 3245 - RNA, 23 nt, Artificial Sequence
  Description of Artificial Sequence: Synthetic oligonucleotide
agccaaccuucaaaaaaauaccu

SEQ ID NO: 3246 - RNA, 23 nt, Artificial Sequence
  Description of Artificial Sequence: Synthetic oligonucleotide
acugccaaccuucaaaaaaauac

SEQ ID NO: 3247 - RNA, 23 nt, Artificial Sequence
  Description of Artificial Sequence: Synthetic oligonucleotide
aaacaacuuucugaaggcccggu

SEQ ID NO: 3248 - RNA, 23 nt, Artificial Sequence
  Description of Artificial Sequence: Synthetic oligonucleotide
acaacaacuuucugaaggcccgg

SEQ ID NO: 3249 - RNA, 23 nt, Artificial Sequence
  Description of Artificial Sequence: Synthetic oligonucleotide
aucaacaacuuucugaaggcccg

SEQ ID NO: 3250 - RNA, 23 nt, Artificial Sequence
  Description of Artificial Sequence: Synthetic oligonucleotide
acaucaacaacuuucugaaggcc

SEQ ID NO: 3251 - RNA, 23 nt, Artificial Sequence
  Description of Artificial Sequence: Synthetic oligonucleotide
aacaucaacaacuuucugaaggc

SEQ ID NO: 3252 - RNA, 23 nt, Artificial Sequence
  Description of Artificial Sequence: Synthetic oligonucleotide
agcacaucaacaacuuucugaag

SEQ ID NO: 3253 - RNA, 23 nt, Artificial Sequence
  Description of Artificial Sequence: Synthetic oligonucleotide
accagcacaucaacaacuuucug

SEQ ID NO: 3254 - RNA, 23 nt, Artificial Sequence
  Description of Artificial Sequence: Synthetic oligonucleotide
agcccuuuguuuuaauggaaucc

SEQ ID NO: 3255 - RNA, 23 nt, Artificial Sequence
  Description of Artificial Sequence: Synthetic oligonucleotide
acagcacucuugcccuuuguuuu

SEQ ID NO: 3256 - RNA, 23 nt, Artificial Sequence
  Description of Artificial Sequence: Synthetic oligonucleotide
aaaguuagugaagucagcacucu

SEQ ID NO: 3257 - RNA, 23 nt, Artificial Sequence
  Description of Artificial Sequence: Synthetic oligonucleotide
acgaaguuagugaagucagcacu

SEQ ID NO: 3258 - RNA, 23 nt, Artificial Sequence
  Description of Artificial Sequence: Synthetic oligonucleotide
aaucgaaguuagugaagucagca

SEQ ID NO: 3259 - RNA, 23 nt, Artificial Sequence
  Description of Artificial Sequence: Synthetic oligonucleotide
agaucgaaguuagugaagucagc

SEQ ID NO: 3260 - RNA, 23 nt, Artificial Sequence
  Description of Artificial Sequence: Synthetic oligonucleotide
aggaucgaaguuagugaagucag

SEQ ID NO: 3261 - RNA, 23 nt, Artificial Sequence
  Description of Artificial Sequence: Synthetic oligonucleotide
acacgaggaucgaaguuagugaa

SEQ ID NO: 3262 - RNA, 23 nt, Artificial Sequence
  Description of Artificial Sequence: Synthetic oligonucleotide
accacgaggaucgaaguuaguga

SEQ ID NO: 3263 - RNA, 23 nt, Artificial Sequence
  Description of Artificial Sequence: Synthetic oligonucleotide
accaaggauucaggaaggaggcc

SEQ ID NO: 3264 - RNA, 23 nt, Artificial Sequence
  Description of Artificial Sequence: Synthetic oligonucleotide
aauccaaggauucaggaaggagg

SEQ ID NO: 3265 - RNA, 23 nt, Artificial Sequence
  Description of Artificial Sequence: Synthetic oligonucleotide
aaauccaaggauucaggaaggag

SEQ ID NO: 3266 - RNA, 23 nt, Artificial Sequence
  Description of Artificial Sequence: Synthetic oligonucleotide
acacacauuccagaagaggaggg

SEQ ID NO: 3267 - RNA, 23 nt, Artificial Sequence
  Description of Artificial Sequence: Synthetic oligonucleotide
aacaauccaggucacacauucca

SEQ ID NO: 3268 - RNA, 23 nt, Artificial Sequence
  Description of Artificial Sequence: Synthetic oligonucleotide
aagcacaauccaggucacacauu

SEQ ID NO: 3269 - RNA, 23 nt, Artificial Sequence
  Description of Artificial Sequence: Synthetic oligonucleotide
acugauggguuccuugagcacaa

SEQ ID NO: 3270 - RNA, 23 nt, Artificial Sequence
  Description of Artificial Sequence: Synthetic oligonucleotide
agacgcugauggguuccuugagc

SEQ ID NO: 3271 - RNA, 23 nt, Artificial Sequence
  Description of Artificial Sequence: Synthetic oligonucleotide
acugacgcugauggguuccuuga

SEQ ID NO: 3272 - RNA, 23 nt, Artificial Sequence
  Description of Artificial Sequence: Synthetic oligonucleotide
acucgcugcugacgcugaugggu

SEQ ID NO: 3273 - RNA, 23 nt, Artificial Sequence
  Description of Artificial Sequence: Synthetic oligonucleotide
aaguuaaguuuacggaauuucaa

SEQ ID NO: 3274 - RNA, 23 nt, Artificial Sequence
  Description of Artificial Sequence: Synthetic oligonucleotide
aaaguuaaguuuacggaauuuca

SEQ ID NO: 3275 - RNA, 23 nt, Artificial Sequence
  Description of Artificial Sequence: Synthetic oligonucleotide
acauugaaguuaaguuuacggaa

SEQ ID NO: 3276 - RNA, 23 nt, Artificial Sequence
  Description of Artificial Sequence: Synthetic oligonucleotide
accauugaaguuaaguuuacgga

SEQ ID NO: 3277 - RNA, 23 nt, Artificial Sequence
  Description of Artificial Sequence: Synthetic oligonucleotide
accaguuguccaccaucaguucu

SEQ ID NO: 3278 - RNA, 23 nt, Artificial Sequence
  Description of Artificial Sequence: Synthetic oligonucleotide
accuguucuucaguggcugagcu

SEQ ID NO: 3279 - RNA, 23 nt, Artificial Sequence
  Description of Artificial Sequence: Synthetic oligonucleotide
aagcuuugauuugccuguucuuc

SEQ ID NO: 3280 - RNA, 23 nt, Artificial Sequence
  Description of Artificial Sequence: Synthetic oligonucleotide
aaaggaagcuuugauuugccugu

SEQ ID NO: 3281 - RNA, 23 nt, Artificial Sequence
  Description of Artificial Sequence: Synthetic oligonucleotide
acuuauuugaaggaagcuuugau

SEQ ID NO: 3282 - RNA, 23 nt, Artificial Sequence
  Description of Artificial Sequence: Synthetic oligonucleotide
aucuuauuugaaggaagcuuuga

SEQ ID NO: 3283 - RNA, 23 nt, Artificial Sequence
  Description of Artificial Sequence: Synthetic oligonucleotide
aaucuuauuugaaggaagcuuug

SEQ ID NO: 3284 - RNA, 23 nt, Artificial Sequence
  Description of Artificial Sequence: Synthetic oligonucleotide
acaucuuauuugaaggaagcuuu

SEQ ID NO: 3285 - RNA, 23 nt, Artificial Sequence
  Description of Artificial Sequence: Synthetic oligonucleotide
accaucuuauuugaaggaagcuu

SEQ ID NO: 3286 - RNA, 23 nt, Artificial Sequence
  Description of Artificial Sequence: Synthetic oligonucleotide
auucauuauuuggauacagacua

SEQ ID NO: 3287 - RNA, 23 nt, Artificial Sequence
  Description of Artificial Sequence: Synthetic oligonucleotide
aaagauucauuauuuggauacag

SEQ ID NO: 3288 - RNA, 23 nt, Artificial Sequence
  Description of Artificial Sequence: Synthetic oligonucleotide
acgaagauucauuauuuggauac

SEQ ID NO: 3289 - RNA, 23 nt, Artificial Sequence
  Description of Artificial Sequence: Synthetic oligonucleotide
accgaagauucauuauuuggaua

SEQ ID NO: 3290 - RNA, 23 nt, Artificial Sequence
  Description of Artificial Sequence: Synthetic oligonucleotide
acccgaagauucauuauuuggau

SEQ ID NO: 3291 - RNA, 23 nt, Artificial Sequence
  Description of Artificial Sequence: Synthetic oligonucleotide
aacccgaagauucauuauuugga

SEQ ID NO: 3292 - RNA, 23 nt, Artificial Sequence
  Description of Artificial Sequence: Synthetic oligonucleotide
acacccgaagauucauuauuugg

SEQ ID NO: 3293 - RNA, 23 nt, Artificial Sequence
  Description of Artificial Sequence: Synthetic oligonucleotide
aacacccgaagauucauuauuug

SEQ ID NO: 3294 - RNA, 23 nt, Artificial Sequence
  Description of Artificial Sequence: Synthetic oligonucleotide
aaacacccgaagauucauuauuu

SEQ ID NO: 3295 - RNA, 23 nt, Artificial Sequence
  Description of Artificial Sequence: Synthetic oligonucleotide
aaaacacccgaagauucauuauu

SEQ ID NO: 3296 - RNA, 23 nt, Artificial Sequence
  Description of Artificial Sequence: Synthetic oligonucleotide
agggaaacacccgaagauucauu

SEQ ID NO: 3297 - RNA, 23 nt, Artificial Sequence
  Description of Artificial Sequence: Synthetic oligonucleotide
aagggaaacacccgaagauucau

SEQ ID NO: 3298 - RNA, 23 nt, Artificial Sequence
  Description of Artificial Sequence: Synthetic oligonucleotide
aaccaagguagaucugugcuuag

SEQ ID NO: 3299 - RNA, 23 nt, Artificial Sequence
  Description of Artificial Sequence: Synthetic oligonucleotide
acaccaagguagaucugugcuua

SEQ ID NO: 3300 - RNA, 23 nt, Artificial Sequence
  Description of Artificial Sequence: Synthetic oligonucleotide
aucaccaagguagaucugugcuu

SEQ ID NO: 3301 - RNA, 23 nt, Artificial Sequence
  Description of Artificial Sequence: Synthetic oligonucleotide
acaaaucaccaagguagaucugu

SEQ ID NO: 3302 - RNA, 23 nt, Artificial Sequence
  Description of Artificial Sequence: Synthetic oligonucleotide
acaaccagccacagcaguugugu

SEQ ID NO: 3303 - RNA, 23 nt, Artificial Sequence
  Description of Artificial Sequence: Synthetic oligonucleotide
accaaccagccacagcaguugug

SEQ ID NO: 3304 - RNA, 23 nt, Artificial Sequence
  Description of Artificial Sequence: Synthetic oligonucleotide
agcaccaaccagccacagcaguu

SEQ ID NO: 3305 - RNA, 23 nt, Artificial Sequence
  Description of Artificial Sequence: Synthetic oligonucleotide
aacaaagcaccaaccagccacag

SEQ ID NO: 3306 - RNA, 23 nt, Artificial Sequence
  Description of Artificial Sequence: Synthetic oligonucleotide
aaaacaaagcaccaaccagccac

SEQ ID NO: 3307 - RNA, 23 nt, Artificial Sequence
  Description of Artificial Sequence: Synthetic oligonucleotide
auaaacaaagcaccaaccagcca

SEQ ID NO: 3308 - RNA, 23 nt, Artificial Sequence
  Description of Artificial Sequence: Synthetic oligonucleotide
aauaaacaaagcaccaaccagcc

SEQ ID NO: 3309 - RNA, 23 nt, Artificial Sequence
  Description of Artificial Sequence: Synthetic oligonucleotide
acauaaacaaagcaccaaccagc

SEQ ID NO: 3310 - RNA, 23 nt, Artificial Sequence
  Description of Artificial Sequence: Synthetic oligonucleotide
accauaaacaaagcaccaaccag

SEQ ID NO: 3311 - RNA, 23 nt, Artificial Sequence
  Description of Artificial Sequence: Synthetic oligonucleotide
aaccauaaacaaagcaccaacca

SEQ ID NO: 3312 - RNA, 23 nt, Artificial Sequence
  Description of Artificial Sequence: Synthetic oligonucleotide
auaccauaaacaaagcaccaacc

SEQ ID NO: 3313 - RNA, 23 nt, Artificial Sequence
  Description of Artificial Sequence: Synthetic oligonucleotide
acuaccauaaacaaagcaccaac

SEQ ID NO: 3314 - RNA, 23 nt, Artificial Sequence
  Description of Artificial Sequence: Synthetic oligonucleotide
acuacuaccauaaacaaagcacc

SEQ ID NO: 3315 - RNA, 23 nt, Artificial Sequence
  Description of Artificial Sequence: Synthetic oligonucleotide
aaaacuacuaccauaaacaaagc

SEQ ID NO: 3316 - RNA, 23 nt, Artificial Sequence
  Description of Artificial Sequence: Synthetic oligonucleotide
aaaaacuacuaccauaaacaaag

SEQ ID NO: 3317 - RNA, 23 nt, Artificial Sequence
  Description of Artificial Sequence: Synthetic oligonucleotide
agaaaaacuacuaccauaaacaa

SEQ ID NO: 3318 - RNA, 23 nt, Artificial Sequence
  Description of Artificial Sequence: Synthetic oligonucleotide
aagaaaaacuacuaccauaaaca

SEQ ID NO: 3319 - RNA, 23 nt, Artificial Sequence
  Description of Artificial Sequence: Synthetic oligonucleotide
acagaaaaacuacuaccauaaac

SEQ ID NO: 3320 - RNA, 23 nt, Artificial Sequence
  Description of Artificial Sequence: Synthetic oligonucleotide
aacagaaaaacuacuaccauaaa

SEQ ID NO: 3321 - RNA, 23 nt, Artificial Sequence
  Description of Artificial Sequence: Synthetic oligonucleotide
auacagaaaaacuacuaccauaa

SEQ ID NO: 3322 - RNA, 23 nt, Artificial Sequence
  Description of Artificial Sequence: Synthetic oligonucleotide
aguguuacagaaaaacuacuacc

SEQ ID NO: 3323 - RNA, 23 nt, Artificial Sequence
  Description of Artificial Sequence: Synthetic oligonucleotide
aaagucaagguacuuuauucuua

SEQ ID NO: 3324 - RNA, 23 nt, Artificial Sequence
  Description of Artificial Sequence: Synthetic oligonucleotide
acaaagucaagguacuuuauucu

SEQ ID NO: 3325 - RNA, 23 nt, Artificial Sequence
  Description of Artificial Sequence: Synthetic oligonucleotide
aacaaagucaagguacuuuauuc

SEQ ID NO: 3326 - RNA, 23 nt, Artificial Sequence
  Description of Artificial Sequence: Synthetic oligonucleotide
aaacaaagucaagguacuuuauu

SEQ ID NO: 3327 - RNA, 23 nt, Artificial Sequence
  Description of Artificial Sequence: Synthetic oligonucleotide
agaacaaagucaagguacuuuau

SEQ ID NO: 3328 - RNA, 23 nt, Artificial Sequence
  Description of Artificial Sequence: Synthetic oligonucleotide
augaacaaagucaagguacuuua

SEQ ID NO: 3329 - RNA, 23 nt, Artificial Sequence
  Description of Artificial Sequence: Synthetic oligonucleotide
acugugaacaaagucaagguacu

SEQ ID NO: 3330 - RNA, 23 nt, Artificial Sequence
  Description of Artificial Sequence: Synthetic oligonucleotide
acuacaugcugugaacaaaguca

SEQ ID NO: 3331 - RNA, 23 nt, Artificial Sequence
  Description of Artificial Sequence: Synthetic oligonucleotide
accuacaugcugugaacaaaguc

SEQ ID NO: 3332 - RNA, 23 nt, Artificial Sequence
  Description of Artificial Sequence: Synthetic oligonucleotide
acccuacaugcugugaacaaagu

SEQ ID NO: 3333 - RNA, 23 nt, Artificial Sequence
  Description of Artificial Sequence: Synthetic oligonucleotide
aacccuacaugcugugaacaaag

SEQ ID NO: 3334 - RNA, 23 nt, Artificial Sequence
  Description of Artificial Sequence: Synthetic oligonucleotide
acacccuacaugcugugaacaaa

SEQ ID NO: 3335 - RNA, 23 nt, Artificial Sequence
  Description of Artificial Sequence: Synthetic oligonucleotide
acaucacccuacaugcugugaac

SEQ ID NO: 3336 - DNA, 23 bp, Artificial Sequence
  Description of Artificial Sequence: Synthetic oligonucleotide
  Description of Combined DNA/RNA Molecule: Synthetic oligonucleotide
agccagtgcucagguccguugug

SEQ ID NO: 3337 - RNA, 23 nt, Artificial Sequence
  Description of Artificial Sequence: Synthetic oligonucleotide
aaugccagugcucagguccguug

SEQ ID NO: 3338 - DNA, 23 bp, Artificial Sequence
  Description of Artificial Sequence: Synthetic oligonucleotide
  Description of Combined DNA/RNA Molecule: Synthetic oligonucleotide
aucctuaugccagugcucagguc

SEQ ID NO: 3339 - DNA, 23 bp, Artificial Sequence
  Description of Artificial Sequence: Synthetic oligonucleotide
  Description of Combined DNA/RNA Molecule: Synthetic oligonucleotide
aguccutaugccagugcucaggu

SEQ ID NO: 3340 - DNA, 23 bp, Artificial Sequence
  Description of Artificial Sequence: Synthetic oligonucleotide
  Description of Combined DNA/RNA Molecule: Synthetic oligonucleotide
aagucctuaugccagugcucagg

SEQ ID NO: 3341 - DNA, 23 bp, Artificial Sequence
  Description of Artificial Sequence: Synthetic oligonucleotide
  Description of Combined DNA/RNA Molecule: Synthetic oligonucleotide
aggaagtccuuaugccagugcuc

SEQ ID NO: 3342 - RNA, 23 nt, Artificial Sequence
  Description of Artificial Sequence: Synthetic oligonucleotide
auuaaaagcagcauuuuagucaa

SEQ ID NO: 3343 - RNA, 23 nt, Artificial Sequence
  Description of Artificial Sequence: Synthetic oligonucleotide
auuuaaaagcagcauuuuaguca

SEQ ID NO: 3344 - RNA, 23 nt, Artificial Sequence
  Description of Artificial Sequence: Synthetic oligonucleotide
auuuuaaaagcagcauuuuaguc

SEQ ID NO: 3345 - RNA, 23 nt, Artificial Sequence
  Description of Artificial Sequence: Synthetic oligonucleotide
aguuuuaaaagcagcauuuuagu

SEQ ID NO: 3346 - RNA, 23 nt, Artificial Sequence
  Description of Artificial Sequence: Synthetic oligonucleotide
accuauguuuuaaaagcagcauu

SEQ ID NO: 3347 - RNA, 23 nt, Artificial Sequence
  Description of Artificial Sequence: Synthetic oligonucleotide
auccuauguuuuaaaagcagcau

SEQ ID NO: 3348 - RNA, 23 nt, Artificial Sequence
  Description of Artificial Sequence: Synthetic oligonucleotide
acuacuuuccuauguuuuaaaag

SEQ ID NO: 3349 - DNA, 23 bp, Artificial Sequence
  Description of Artificial Sequence: Synthetic oligonucleotide
  Description of Combined DNA/RNA Molecule: Synthetic oligonucleotide
aaugagtgucgaugucaacaggg

SEQ ID NO: 3350 - DNA, 23 bp, Artificial Sequence
  Description of Artificial Sequence: Synthetic oligonucleotide
  Description of Combined DNA/RNA Molecule: Synthetic oligonucleotide
aguatgagugucgaugucaacag

SEQ ID NO: 3351 - RNA, 23 nt, Artificial Sequence
  Description of Artificial Sequence: Synthetic oligonucleotide
agcuguaugagugucgaugucaa

SEQ ID NO: 3352 - DNA, 23 bp, Artificial Sequence
  Description of Artificial Sequence: Synthetic oligonucleotide
  Description of Combined DNA/RNA Molecule: Synthetic oligonucleotide
aggctgtaugagugucgauguca

SEQ ID NO: 3353 - DNA, 23 bp, Artificial Sequence
  Description of Artificial Sequence: Synthetic oligonucleotide
  Description of Combined DNA/RNA Molecule: Synthetic oligonucleotide
auuggctguaugagugucgaugu

SEQ ID NO: 3354 - DNA, 23 bp, Artificial Sequence
  Description of Artificial Sequence: Synthetic oligonucleotide
  Description of Combined DNA/RNA Molecule: Synthetic oligonucleotide
aauacutggcuguaugagugucg

SEQ ID NO: 3355 - RNA, 23 nt, Artificial Sequence
  Description of Artificial Sequence: Synthetic oligonucleotide
agucauacuuggcuguaugagug

SEQ ID NO: 3356 - DNA, 23 bp, Artificial Sequence
  Description of Artificial Sequence: Synthetic oligonucleotide
  Description of Combined DNA/RNA Molecule: Synthetic oligonucleotide
aggucatacuuggcuguaugagu

SEQ ID NO: 3357 - DNA, 23 bp, Artificial Sequence
  Description of Artificial Sequence: Synthetic oligonucleotide
  Description of Combined DNA/RNA Molecule: Synthetic oligonucleotide
agggtcauacuuggcuguaugag

SEQ ID NO: 3358 - DNA, 23 bp, Artificial Sequence
  Description of Artificial Sequence: Synthetic oligonucleotide
  Description of Combined DNA/RNA Molecule: Synthetic oligonucleotide
aaagggtcauacuuggcuguaug

SEQ ID NO: 3359 - RNA, 23 nt, Artificial Sequence
  Description of Artificial Sequence: Synthetic oligonucleotide
aagggaagggucauacuuggcug

SEQ ID NO: 3360 - RNA, 23 nt, Artificial Sequence
  Description of Artificial Sequence: Synthetic oligonucleotide
acuuaacuagcucaauuuaucuu

SEQ ID NO: 3361 - RNA, 23 nt, Artificial Sequence
  Description of Artificial Sequence: Synthetic oligonucleotide
accuuaacuagcucaauuuaucu

SEQ ID NO: 3362 - RNA, 23 nt, Artificial Sequence
  Description of Artificial Sequence: Synthetic oligonucleotide
agccuuaacuagcucaauuuauc

SEQ ID NO: 3363 - DNA, 23 bp, Artificial Sequence
  Description of Artificial Sequence: Synthetic oligonucleotide
  Description of Combined DNA/RNA Molecule: Synthetic oligonucleotide
agcutcagggaagggucauacuu

SEQ ID NO: 3364 - DNA, 23 bp, Artificial Sequence
  Description of Artificial Sequence: Synthetic oligonucleotide
  Description of Combined DNA/RNA Molecule: Synthetic oligonucleotide
augatcauaggaaacagacaggg

SEQ ID NO: 3365 - DNA, 23 bp, Artificial Sequence
  Description of Artificial Sequence: Synthetic oligonucleotide
  Description of Combined DNA/RNA Molecule: Synthetic oligonucleotide
acuugatcauaggaaacagacag

SEQ ID NO: 3366 - DNA, 23 bp, Artificial Sequence
  Description of Artificial Sequence: Synthetic oligonucleotide
  Description of Combined DNA/RNA Molecule: Synthetic oligonucleotide
agcutgaucauaggaaacagaca

SEQ ID NO: 3367 - DNA, 23 bp, Artificial Sequence
  Description of Artificial Sequence: Synthetic oligonucleotide
  Description of Combined DNA/RNA Molecule: Synthetic oligonucleotide
auugcutgaucauaggaaacaga

SEQ ID NO: 3368 - DNA, 23 bp, Artificial Sequence
  Description of Artificial Sequence: Synthetic oligonucleotide
  Description of Combined DNA/RNA Molecule: Synthetic oligonucleotide
aguugctugaucauaggaaacag

SEQ ID NO: 3369 - DNA, 23 bp, Artificial Sequence
  Description of Artificial Sequence: Synthetic oligonucleotide
  Description of Combined DNA/RNA Molecule: Synthetic oligonucleotide
agaagutgcuugaucauaggaaa

SEQ ID NO: 3370 - RNA, 23 nt, Artificial Sequence
  Description of Artificial Sequence: Synthetic oligonucleotide
acugauuugccuuaacuagcuca

SEQ ID NO: 3371 - RNA, 23 nt, Artificial Sequence
  Description of Artificial Sequence: Synthetic oligonucleotide
accugauuugccuuaacuagcuc

SEQ ID NO: 3372 - RNA, 23 nt, Artificial Sequence
  Description of Artificial Sequence: Synthetic oligonucleotide
aauuuuaccugauuugccuuaac

SEQ ID NO: 3373 - RNA, 23 nt, Artificial Sequence
  Description of Artificial Sequence: Synthetic oligonucleotide
acuauuuuaccugauuugccuua

SEQ ID NO: 3374 - RNA, 23 nt, Artificial Sequence
  Description of Artificial Sequence: Synthetic oligonucleotide
aacuauuuuaccugauuugccuu

SEQ ID NO: 3375 - RNA, 23 nt, Artificial Sequence
  Description of Artificial Sequence: Synthetic oligonucleotide
agacuauuuuaccugauuugccu

SEQ ID NO: 3376 - RNA, 23 nt, Artificial Sequence
  Description of Artificial Sequence: Synthetic oligonucleotide
auagaaucaugacuauuuuaccu

SEQ ID NO: 3377 - RNA, 23 nt, Artificial Sequence
  Description of Artificial Sequence: Synthetic oligonucleotide
aauagaaucaugacuauuuuacc

SEQ ID NO: 3378 - RNA, 23 nt, Artificial Sequence
  Description of Artificial Sequence: Synthetic oligonucleotide
acauagaaucaugacuauuuuac

SEQ ID NO: 3379 - RNA, 23 nt, Artificial Sequence
  Description of Artificial Sequence: Synthetic oligonucleotide
acauuacauagaaucaugacuau

SEQ ID NO: 3380 - RNA, 23 nt, Artificial Sequence
  Description of Artificial Sequence: Synthetic oligonucleotide
aacauuacauagaaucaugacua

SEQ ID NO: 3381 - RNA, 23 nt, Artificial Sequence
  Description of Artificial Sequence: Synthetic oligonucleotide
auacauuacauagaaucaugacu

SEQ ID NO: 3382 - DNA, 23 bp, Artificial Sequence
  Description of Artificial Sequence: Synthetic oligonucleotide
  Description of Combined DNA/RNA Molecule: Synthetic oligonucleotide
aauugutgaggauccucagggaa

SEQ ID NO: 3383 - DNA, 23 bp, Artificial Sequence
  Description of Artificial Sequence: Synthetic oligonucleotide
  Description of Combined DNA/RNA Molecule: Synthetic oligonucleotide
acautgtugaggauccucaggga

SEQ ID NO: 3384 - DNA, 23 bp, Artificial Sequence
  Description of Artificial Sequence: Synthetic oligonucleotide
  Description of Combined DNA/RNA Molecule: Synthetic oligonucleotide
agaccatuguugaggauccucag

SEQ ID NO: 3385 - RNA, 23 nt, Artificial Sequence
  Description of Artificial Sequence: Synthetic oligonucleotide
augaccauuguugaggauccuca

SEQ ID NO: 3386 - DNA, 23 bp, Artificial Sequence
  Description of Artificial Sequence: Synthetic oligonucleotide
  Description of Combined DNA/RNA Molecule: Synthetic oligonucleotide
acaaactccacguugaaagcaug

SEQ ID NO: 3387 - DNA, 23 bp, Artificial Sequence
  Description of Artificial Sequence: Synthetic oligonucleotide
  Description of Combined DNA/RNA Molecule: Synthetic oligonucleotide
aucatcaaacuccacguugaaag

SEQ ID NO: 3388 - DNA, 23 bp, Artificial Sequence
  Description of Artificial Sequence: Synthetic oligonucleotide
  Description of Combined DNA/RNA Molecule: Synthetic oligonucleotide
aagucatcaaacuccacguugaa

SEQ ID NO: 3389 - DNA, 23 bp, Artificial Sequence
  Description of Artificial Sequence: Synthetic oligonucleotide
  Description of Combined DNA/RNA Molecule: Synthetic oligonucleotide
agagtcaucaaacuccacguuga

SEQ ID NO: 3390 - DNA, 23 bp, Artificial Sequence
  Description of Artificial Sequence: Synthetic oligonucleotide
  Description of Combined DNA/RNA Molecule: Synthetic oligonucleotide
agagagtcaucaaacuccacguu

SEQ ID NO: 3391 - RNA, 23 nt, Artificial Sequence
  Description of Artificial Sequence: Synthetic oligonucleotide
acugagagucaucaaacuccacg

SEQ ID NO: 3392 - DNA, 23 bp, Artificial Sequence
  Description of Artificial Sequence: Synthetic oligonucleotide
  Description of Combined DNA/RNA Molecule: Synthetic oligonucleotide
aucctgagagucaucaaacucca

SEQ ID NO: 3393 - DNA, 23 bp, Artificial Sequence
  Description of Artificial Sequence: Synthetic oligonucleotide
  Description of Combined DNA/RNA Molecule: Synthetic oligonucleotide
augucctgagagucaucaaacuc

SEQ ID NO: 3394 - DNA, 23 bp, Artificial Sequence
  Description of Artificial Sequence: Synthetic oligonucleotide
  Description of Combined DNA/RNA Molecule: Synthetic oligonucleotide
acuutgtccugagagucaucaaa

SEQ ID NO: 3395 - RNA, 23 nt, Artificial Sequence
  Description of Artificial Sequence: Synthetic oligonucleotide
acuguaucacaacucuaauuaua

SEQ ID NO: 3396 - RNA, 23 nt, Artificial Sequence
  Description of Artificial Sequence: Synthetic oligonucleotide
aaauauacucuguaucacaacuc

SEQ ID NO: 3397 - RNA, 23 nt, Artificial Sequence
  Description of Artificial Sequence: Synthetic oligonucleotide
aaaauauacucuguaucacaacu

SEQ ID NO: 3398 - RNA, 23 nt, Artificial Sequence
  Description of Artificial Sequence: Synthetic oligonucleotide
agaaauauacucuguaucacaac

SEQ ID NO: 3399 - DNA, 23 bp, Artificial Sequence
  Description of Artificial Sequence: Synthetic oligonucleotide
  Description of Combined DNA/RNA Molecule: Synthetic oligonucleotide
augctutguccugagagucauca

SEQ ID NO: 3400 - DNA, 23 bp, Artificial Sequence
  Description of Artificial Sequence: Synthetic oligonucleotide
  Description of Combined DNA/RNA Molecule: Synthetic oligonucleotide
acugcutuguccugagagucauc

SEQ ID NO: 3401 - RNA, 23 nt, Artificial Sequence
  Description of Artificial Sequence: Synthetic oligonucleotide
aaugauauauugucugaauggaa

SEQ ID NO: 3402 - DNA, 23 bp, Artificial Sequence
  Description of Artificial Sequence: Synthetic oligonucleotide
  Description of Combined DNA/RNA Molecule: Synthetic oligonucleotide
auccagtgaaccaagugaaguuc

SEQ ID NO: 3403 - RNA, 23 nt, Artificial Sequence
  Description of Artificial Sequence: Synthetic oligonucleotide
aguuccagugaaccaagugaagu

SEQ ID NO: 3404 - RNA, 23 nt, Artificial Sequence
  Description of Artificial Sequence: Synthetic oligonucleotide
augcacagcuuucccaaaauccc

SEQ ID NO: 3405 - RNA, 23 nt, Artificial Sequence
  Description of Artificial Sequence: Synthetic oligonucleotide
agcugcacagcuuucccaaaauc

SEQ ID NO: 3406 - DNA, 23 bp, Artificial Sequence
  Description of Artificial Sequence: Synthetic oligonucleotide
  Description of Combined DNA/RNA Molecule: Synthetic oligonucleotide
aguugctgcacagcuuucccaaa

SEQ ID NO: 3407 - RNA, 23 nt, Artificial Sequence
  Description of Artificial Sequence: Synthetic oligonucleotide
auaccuagaacggccaguccauc

SEQ ID NO: 3408 - DNA, 23 bp, Artificial Sequence
  Description of Artificial Sequence: Synthetic oligonucleotide
  Description of Combined DNA/RNA Molecule: Synthetic oligonucleotide
aauacctagaacggccaguccau

SEQ ID NO: 3409 - DNA, 23 bp, Artificial Sequence
  Description of Artificial Sequence: Synthetic oligonucleotide
  Description of Combined DNA/RNA Molecule: Synthetic oligonucleotide
aaaccutcaaaaaaauaccuaga

SEQ ID NO: 3410 - RNA, 23 nt, Artificial Sequence
  Description of Artificial Sequence: Synthetic oligonucleotide
augccaaccuucaaaaaaauacc

SEQ ID NO: 3411 - RNA, 23 nt, Artificial Sequence
  Description of Artificial Sequence: Synthetic oligonucleotide
acugccaaccuucaaaaaaauac

SEQ ID NO: 3412 - DNA, 23 bp, Artificial Sequence
  Description of Artificial Sequence: Synthetic oligonucleotide
  Description of Combined DNA/RNA Molecule: Synthetic oligonucleotide
aagcgctgccaaccuucaaaaaa

SEQ ID NO: 3413 - DNA, 23 bp, Artificial Sequence
  Description of Artificial Sequence: Synthetic oligonucleotide
  Description of Combined DNA/RNA Molecule: Synthetic oligonucleotide
aggutuagcgcugccaaccuuca

SEQ ID NO: 3414 - DNA, 23 bp, Artificial Sequence
  Description of Artificial Sequence: Synthetic oligonucleotide
  Description of Combined DNA/RNA Molecule: Synthetic oligonucleotide
aacatcaacaacuuucugaaggc

SEQ ID NO: 3415 - DNA, 23 bp, Artificial Sequence
  Description of Artificial Sequence: Synthetic oligonucleotide
  Description of Combined DNA/RNA Molecule: Synthetic oligonucleotide
agcacatcaacaacuuucugaag

SEQ ID NO: 3416 - RNA, 23 nt, Artificial Sequence
  Description of Artificial Sequence: Synthetic oligonucleotide
aagcacaucaacaacuuucugaa

SEQ ID NO: 3417 - RNA, 23 nt, Artificial Sequence
  Description of Artificial Sequence: Synthetic oligonucleotide
accagcacaucaacaacuuucug

SEQ ID NO: 3418 - DNA, 23 bp, Artificial Sequence
  Description of Artificial Sequence: Synthetic oligonucleotide
  Description of Combined DNA/RNA Molecule: Synthetic oligonucleotide
agcccutuguuuuaauggaaucc

SEQ ID NO: 3419 - DNA, 23 bp, Artificial Sequence
  Description of Artificial Sequence: Synthetic oligonucleotide
  Description of Combined DNA/RNA Molecule: Synthetic oligonucleotide
augccctuuguuuuaauggaauc

SEQ ID NO: 3420 - DNA, 23 bp, Artificial Sequence
  Description of Artificial Sequence: Synthetic oligonucleotide
  Description of Combined DNA/RNA Molecule: Synthetic oligonucleotide
aacucutgcccuuuguuuuaaug

SEQ ID NO: 3421 - DNA, 23 bp, Artificial Sequence
  Description of Artificial Sequence: Synthetic oligonucleotide
  Description of Combined DNA/RNA Molecule: Synthetic oligonucleotide
acactctugcccuuuguuuuaau

SEQ ID NO: 3422 - DNA, 23 bp, Artificial Sequence
  Description of Artificial Sequence: Synthetic oligonucleotide
  Description of Combined DNA/RNA Molecule: Synthetic oligonucleotide
aagcactcuugcccuuuguuuua

SEQ ID NO: 3423 - RNA, 23 nt, Artificial Sequence
  Description of Artificial Sequence: Synthetic oligonucleotide
aucagcacucuugcccuuuguuu

SEQ ID NO: 3424 - DNA, 23 bp, Artificial Sequence
  Description of Artificial Sequence: Synthetic oligonucleotide
  Description of Combined DNA/RNA Molecule: Synthetic oligonucleotide
aaagtcagcacucuugcccuuug

SEQ ID NO: 3425 - DNA, 23 bp, Artificial Sequence
  Description of Artificial Sequence: Synthetic oligonucleotide
  Description of Combined DNA/RNA Molecule: Synthetic oligonucleotide
augaagtcagcacucuugcccuu

SEQ ID NO: 3426 - RNA, 23 nt, Artificial Sequence
  Description of Artificial Sequence: Synthetic oligonucleotide
aagugaagucagcacucuugccc

SEQ ID NO: 3427 - DNA, 23 bp, Artificial Sequence
  Description of Artificial Sequence: Synthetic oligonucleotide
  Description of Combined DNA/RNA Molecule: Synthetic oligonucleotide
auagtgaagucagcacucuugcc

SEQ ID NO: 3428 - DNA, 23 bp, Artificial Sequence
  Description of Artificial Sequence: Synthetic oligonucleotide
  Description of Combined DNA/RNA Molecule: Synthetic oligonucleotide
aguuagtgaagucagcacucuug

SEQ ID NO: 3429 - DNA, 23 bp, Artificial Sequence
  Description of Artificial Sequence: Synthetic oligonucleotide
  Description of Combined DNA/RNA Molecule: Synthetic oligonucleotide
agaagutagugaagucagcacuc

SEQ ID NO: 3430 - DNA, 23 bp, Artificial Sequence
  Description of Artificial Sequence: Synthetic oligonucleotide
  Description of Combined DNA/RNA Molecule: Synthetic oligonucleotide
acgaagtuagugaagucagcacu

SEQ ID NO: 3431 - DNA, 23 bp, Artificial Sequence
  Description of Artificial Sequence: Synthetic oligonucleotide
  Description of Combined DNA/RNA Molecule: Synthetic oligonucleotide
agaggatcgaaguuagugaaguc

SEQ ID NO: 3432 - RNA, 23 nt, Artificial Sequence
  Description of Artificial Sequence: Synthetic oligonucleotide
acgaggaucgaaguuagugaagu

SEQ ID NO: 3433 - RNA, 23 nt, Artificial Sequence
  Description of Artificial Sequence: Synthetic oligonucleotide
acaaggauucaggaaggaggcca

SEQ ID NO: 3434 - RNA, 23 nt, Artificial Sequence
  Description of Artificial Sequence: Synthetic oligonucleotide
aauccaaggauucaggaaggagg

SEQ ID NO: 3435 - DNA, 23 bp, Artificial Sequence
  Description of Artificial Sequence: Synthetic oligonucleotide
  Description of Combined DNA/RNA Molecule: Synthetic oligonucleotide
acagtgagccuggguagguccag

SEQ ID NO: 3436 - DNA, 23 bp, Artificial Sequence
  Description of Artificial Sequence: Synthetic oligonucleotide
  Description of Combined DNA/RNA Molecule: Synthetic oligonucleotide
agucagtgagccuggguaggucc

SEQ ID NO: 3437 - DNA, 23 bp, Artificial Sequence
  Description of Artificial Sequence: Synthetic oligonucleotide
  Description of Combined DNA/RNA Molecule: Synthetic oligonucleotide
auggtcagugagccuggguaggu

SEQ ID NO: 3438 - DNA, 23 bp, Artificial Sequence
  Description of Artificial Sequence: Synthetic oligonucleotide
  Description of Combined DNA/RNA Molecule: Synthetic oligonucleotide
agguggtcagugagccuggguag

SEQ ID NO: 3439 - RNA, 23 nt, Artificial Sequence
  Description of Artificial Sequence: Synthetic oligonucleotide
acacacauuccagaagaggaggg

SEQ ID NO: 3440 - RNA, 23 nt, Artificial Sequence
  Description of Artificial Sequence: Synthetic oligonucleotide
agucacacauuccagaagaggag

SEQ ID NO: 3441 - DNA, 23 bp, Artificial Sequence
  Description of Artificial Sequence: Synthetic oligonucleotide
  Description of Combined DNA/RNA Molecule: Synthetic oligonucleotide
aaggtcacacauuccagaagagg

SEQ ID NO: 3442 - DNA, 23 bp, Artificial Sequence
  Description of Artificial Sequence: Synthetic oligonucleotide
  Description of Combined DNA/RNA Molecule: Synthetic oligonucleotide
accaggtcacacauuccagaaga

SEQ ID NO: 3443 - RNA, 23 nt, Artificial Sequence
  Description of Artificial Sequence: Synthetic oligonucleotide
aaauccaggucacacauuccaga

SEQ ID NO: 3444 - RNA, 23 nt, Artificial Sequence
  Description of Artificial Sequence: Synthetic oligonucleotide
aagcacaauccaggucacacauu

SEQ ID NO: 3445 - RNA, 23 nt, Artificial Sequence
  Description of Artificial Sequence: Synthetic oligonucleotide
augagcacaauccaggucacaca

SEQ ID NO: 3446 - DNA, 23 bp, Artificial Sequence
  Description of Artificial Sequence: Synthetic oligonucleotide
  Description of Combined DNA/RNA Molecule: Synthetic oligonucleotide
accutgagcacaauccaggucac

SEQ ID NO: 3447 - DNA, 23 bp, Artificial Sequence
  Description of Artificial Sequence: Synthetic oligonucleotide
  Description of Combined DNA/RNA Molecule: Synthetic oligonucleotide
auuccutgagcacaauccagguc

SEQ ID NO: 3448 - DNA, 23 bp, Artificial Sequence
  Description of Artificial Sequence: Synthetic oligonucleotide
  Description of Combined DNA/RNA Molecule: Synthetic oligonucleotide
aguucctugagcacaauccaggu

SEQ ID NO: 3449 - DNA, 23 bp, Artificial Sequence
  Description of Artificial Sequence: Synthetic oligonucleotide
  Description of Combined DNA/RNA Molecule: Synthetic oligonucleotide
augggutccuugagcacaaucca

SEQ ID NO: 3450 - DNA, 23 bp, Artificial Sequence
  Description of Artificial Sequence: Synthetic oligonucleotide
  Description of Combined DNA/RNA Molecule: Synthetic oligonucleotide
aaugggtuccuugagcacaaucc

SEQ ID NO: 3451 - DNA, 23 bp, Artificial Sequence
  Description of Artificial Sequence: Synthetic oligonucleotide
  Description of Combined DNA/RNA Molecule: Synthetic oligonucleotide
agcugatggguuccuugagcaca

SEQ ID NO: 3452 - DNA, 23 bp, Artificial Sequence
  Description of Artificial Sequence: Synthetic oligonucleotide
  Description of Combined DNA/RNA Molecule: Synthetic oligonucleotide
acgctgauggguuccuugagcac

SEQ ID NO: 3453 - DNA, 23 bp, Artificial Sequence
  Description of Artificial Sequence: Synthetic oligonucleotide
  Description of Combined DNA/RNA Molecule: Synthetic oligonucleotide
agacgctgauggguuccuugagc

SEQ ID NO: 3454 - DNA, 23 bp, Artificial Sequence
  Description of Artificial Sequence: Synthetic oligonucleotide
  Description of Combined DNA/RNA Molecule: Synthetic oligonucleotide
augctgacgcugauggguuccuu

SEQ ID NO: 3455 - DNA, 23 bp, Artificial Sequence
  Description of Artificial Sequence: Synthetic oligonucleotide
  Description of Combined DNA/RNA Molecule: Synthetic oligonucleotide
agcugctgacgcugauggguucc

SEQ ID NO: 3456 - DNA, 23 bp, Artificial Sequence
  Description of Artificial Sequence: Synthetic oligonucleotide
  Description of Combined DNA/RNA Molecule: Synthetic oligonucleotide
auuaagtuuacggaauuucaaca

SEQ ID NO: 3457 - DNA, 23 bp, Artificial Sequence
  Description of Artificial Sequence: Synthetic oligonucleotide
  Description of Combined DNA/RNA Molecule: Synthetic oligonucleotide
aagutaaguuuacggaauuucaa

SEQ ID NO: 3458 - DNA, 23 bp, Artificial Sequence
  Description of Artificial Sequence: Synthetic oligonucleotide
  Description of Combined DNA/RNA Molecule: Synthetic oligonucleotide
agaagutaaguuuacggaauuuc

SEQ ID NO: 3459 - DNA, 23 bp, Artificial Sequence
  Description of Artificial Sequence: Synthetic oligonucleotide
  Description of Combined DNA/RNA Molecule: Synthetic oligonucleotide
augaagtuaaguuuacggaauuu

SEQ ID NO: 3460 - RNA, 23 nt, Artificial Sequence
  Description of Artificial Sequence: Synthetic oligonucleotide
aauugaaguuaaguuuacggaau

SEQ ID NO: 3461 - DNA, 23 bp, Artificial Sequence
  Description of Artificial Sequence: Synthetic oligonucleotide
  Description of Combined DNA/RNA Molecule: Synthetic oligonucleotide
acautgaaguuaaguuuacggaa

SEQ ID NO: 3462 - RNA, 23 nt, Artificial Sequence
  Description of Artificial Sequence: Synthetic oligonucleotide
auguccaccaucaguucuucggg

SEQ ID NO: 3463 - DNA, 23 bp, Artificial Sequence
  Description of Artificial Sequence: Synthetic oligonucleotide
  Description of Combined DNA/RNA Molecule: Synthetic oligonucleotide
aagutgtccaccaucaguucuuc

SEQ ID NO: 3464 - DNA, 23 bp, Artificial Sequence
  Description of Artificial Sequence: Synthetic oligonucleotide
  Description of Combined DNA/RNA Molecule: Synthetic oligonucleotide
accagutguccaccaucaguucu

SEQ ID NO: 3465 - DNA, 23 bp, Artificial Sequence
  Description of Artificial Sequence: Synthetic oligonucleotide
  Description of Combined DNA/RNA Molecule: Synthetic oligonucleotide
agccagtuguccaccaucaguuc

SEQ ID NO: 3466 - RNA, 23 nt, Artificial Sequence
  Description of Artificial Sequence: Synthetic oligonucleotide
agcgccaguuguccaccaucagu

SEQ ID NO: 3467 - DNA, 23 bp, Artificial Sequence
  Description of Artificial Sequence: Synthetic oligonucleotide
  Description of Combined DNA/RNA Molecule: Synthetic oligonucleotide
aguucutcaguggcugagcuggg

SEQ ID NO: 3468 - DNA, 23 bp, Artificial Sequence
  Description of Artificial Sequence: Synthetic oligonucleotide
  Description of Combined DNA/RNA Molecule: Synthetic oligonucleotide
augutctucaguggcugagcugg

SEQ ID NO: 3469 - DNA, 23 bp, Artificial Sequence
  Description of Artificial Sequence: Synthetic oligonucleotide
  Description of Combined DNA/RNA Molecule: Synthetic oligonucleotide
accugutcuucaguggcugagcu

SEQ ID NO: 3470 - DNA, 23 bp, Artificial Sequence
  Description of Artificial Sequence: Synthetic oligonucleotide
  Description of Combined DNA/RNA Molecule: Synthetic oligonucleotide
agcctgtucuucaguggcugagc

SEQ ID NO: 3471 - DNA, 23 bp, Artificial Sequence
  Description of Artificial Sequence: Synthetic oligonucleotide
  Description of Combined DNA/RNA Molecule: Synthetic oligonucleotide
auugcctguucuucaguggcuga

SEQ ID NO: 3472 - DNA, 23 bp, Artificial Sequence
  Description of Artificial Sequence: Synthetic oligonucleotide
  Description of Combined DNA/RNA Molecule: Synthetic oligonucleotide
augatutgccuguucuucagugg

SEQ ID NO: 3473 - DNA, 23 bp, Artificial Sequence
  Description of Artificial Sequence: Synthetic oligonucleotide
  Description of Combined DNA/RNA Molecule: Synthetic oligonucleotide
auugautugccuguucuucagug

SEQ ID NO: 3474 - DNA, 23 bp, Artificial Sequence
  Description of Artificial Sequence: Synthetic oligonucleotide
  Description of Combined DNA/RNA Molecule: Synthetic oligonucleotide
auuugatuugccuguucuucagu

SEQ ID NO: 3475 - DNA, 23 bp, Artificial Sequence
  Description of Artificial Sequence: Synthetic oligonucleotide
  Description of Combined DNA/RNA Molecule: Synthetic oligonucleotide
acuutgauuugccuguucuucag

SEQ ID NO: 3476 - DNA, 23 bp, Artificial Sequence
  Description of Artificial Sequence: Synthetic oligonucleotide
  Description of Combined DNA/RNA Molecule: Synthetic oligonucleotide
aagctutgauuugccuguucuuc

SEQ ID NO: 3477 - DNA, 23 bp, Artificial Sequence
  Description of Artificial Sequence: Synthetic oligonucleotide
  Description of Combined DNA/RNA Molecule: Synthetic oligonucleotide
aaagcutugauuugccuguucuu

SEQ ID NO: 3478 - DNA, 23 bp, Artificial Sequence
  Description of Artificial Sequence: Synthetic oligonucleotide
  Description of Combined DNA/RNA Molecule: Synthetic oligonucleotide
agaagctuugauuugccuguucu

SEQ ID NO: 3479 - RNA, 23 nt, Artificial Sequence
  Description of Artificial Sequence: Synthetic oligonucleotide
aaaggaagcuuugauuugccugu

SEQ ID NO: 3480 - RNA, 23 nt, Artificial Sequence
  Description of Artificial Sequence: Synthetic oligonucleotide
agaaggaagcuuugauuugccug

SEQ ID NO: 3481 - RNA, 23 nt, Artificial Sequence
  Description of Artificial Sequence: Synthetic oligonucleotide
auuugaaggaagcuuugauuugc

SEQ ID NO: 3482 - DNA, 23 bp, Artificial Sequence
  Description of Artificial Sequence: Synthetic oligonucleotide
  Description of Combined DNA/RNA Molecule: Synthetic oligonucleotide
aauutgaaggaagcuuugauuug

SEQ ID NO: 3483 - DNA, 23 bp, Artificial Sequence
  Description of Artificial Sequence: Synthetic oligonucleotide
  Description of Combined DNA/RNA Molecule: Synthetic oligonucleotide
auuatutgaaggaagcuuugauu

SEQ ID NO: 3484 - DNA, 23 bp, Artificial Sequence
  Description of Artificial Sequence: Synthetic oligonucleotide
  Description of Combined DNA/RNA Molecule: Synthetic oligonucleotide
aucutatuugaaggaagcuuuga

SEQ ID NO: 3485 - DNA, 23 bp, Artificial Sequence
  Description of Artificial Sequence: Synthetic oligonucleotide
  Description of Combined DNA/RNA Molecule: Synthetic oligonucleotide
aauctuauuugaaggaagcuuug

SEQ ID NO: 3486 - DNA, 23 bp, Artificial Sequence
  Description of Artificial Sequence: Synthetic oligonucleotide
  Description of Combined DNA/RNA Molecule: Synthetic oligonucleotide
accatctuauuugaaggaagcuu

SEQ ID NO: 3487 - DNA, 23 bp, Artificial Sequence
  Description of Artificial Sequence: Synthetic oligonucleotide
  Description of Combined DNA/RNA Molecule: Synthetic oligonucleotide
agaccatcuuauuugaaggaagc

SEQ ID NO: 3488 - RNA, 23 nt, Artificial Sequence
  Description of Artificial Sequence: Synthetic oligonucleotide
aggaccaucuuauuugaaggaag

SEQ ID NO: 3489 - RNA, 23 nt, Artificial Sequence
  Description of Artificial Sequence: Synthetic oligonucleotide
aaugggaccaucuuauuugaagg

SEQ ID NO: 3490 - DNA, 23 bp, Artificial Sequence
  Description of Artificial Sequence: Synthetic oligonucleotide
  Description of Combined DNA/RNA Molecule: Synthetic oligonucleotide
auucautauuuggauacagacua

SEQ ID NO: 3491 - DNA, 23 bp, Artificial Sequence
  Description of Artificial Sequence: Synthetic oligonucleotide
  Description of Combined DNA/RNA Molecule: Synthetic oligonucleotide
aauucatuauuuggauacagacu

SEQ ID NO: 3492 - DNA, 23 bp, Artificial Sequence
  Description of Artificial Sequence: Synthetic oligonucleotide
  Description of Combined DNA/RNA Molecule: Synthetic oligonucleotide
agautcauuauuuggauacagac

SEQ ID NO: 3493 - DNA, 23 bp, Artificial Sequence
  Description of Artificial Sequence: Synthetic oligonucleotide
  Description of Combined DNA/RNA Molecule: Synthetic oligonucleotide
aaagautcauuauuuggauacag

SEQ ID NO: 3494 - DNA, 23 bp, Artificial Sequence
  Description of Artificial Sequence: Synthetic oligonucleotide
  Description of Combined DNA/RNA Molecule: Synthetic oligonucleotide
agaagatucauuauuuggauaca

SEQ ID NO: 3495 - RNA, 23 nt, Artificial Sequence
  Description of Artificial Sequence: Synthetic oligonucleotide
acgaagauucauuauuuggauac

SEQ ID NO: 3496 - RNA, 23 nt, Artificial Sequence
  Description of Artificial Sequence: Synthetic oligonucleotide
agaaacacccgaagauucauuau

SEQ ID NO: 3497 - RNA, 23 nt, Artificial Sequence
  Description of Artificial Sequence: Synthetic oligonucleotide
agggaaacacccgaagauucauu

SEQ ID NO: 3498 - DNA, 23 bp, Artificial Sequence
  Description of Artificial Sequence: Synthetic oligonucleotide
  Description of Combined DNA/RNA Molecule: Synthetic oligonucleotide
aguagatcugugcuuagcuaaag

SEQ ID NO: 3499 - RNA, 23 nt, Artificial Sequence
  Description of Artificial Sequence: Synthetic oligonucleotide
agguagaucugugcuuagcuaaa

SEQ ID NO: 3500 - RNA, 23 nt, Artificial Sequence
  Description of Artificial Sequence: Synthetic oligonucleotide
aaagguagaucugugcuuagcua

SEQ ID NO: 3501 - DNA, 23 bp, Artificial Sequence
  Description of Artificial Sequence: Synthetic oligonucleotide
  Description of Combined DNA/RNA Molecule: Synthetic oligonucleotide
acaaggtagaucugugcuuagcu

SEQ ID NO: 3502 - DNA, 23 bp, Artificial Sequence
  Description of Artificial Sequence: Synthetic oligonucleotide
  Description of Combined DNA/RNA Molecule: Synthetic oligonucleotide
aaaatcaccaagguagaucugug

SEQ ID NO: 3503 - DNA, 23 bp, Artificial Sequence
  Description of Artificial Sequence: Synthetic oligonucleotide
  Description of Combined DNA/RNA Molecule: Synthetic oligonucleotide
aucuagtcuucacauuuuauuag

SEQ ID NO: 3504 - RNA, 23 nt, Artificial Sequence
  Description of Artificial Sequence: Synthetic oligonucleotide
acaaccagccacagcaguugugu

SEQ ID NO: 3505 - RNA, 23 nt, Artificial Sequence
  Description of Artificial Sequence: Synthetic oligonucleotide
aaaagcaccaaccagccacagca

SEQ ID NO: 3506 - DNA, 23 bp, Artificial Sequence
  Description of Artificial Sequence: Synthetic oligonucleotide
  Description of Combined DNA/RNA Molecule: Synthetic oligonucleotide
auaccataaacaaagcaccaacc

SEQ ID NO: 3507 - DNA, 23 bp, Artificial Sequence
  Description of Artificial Sequence: Synthetic oligonucleotide
  Description of Combined DNA/RNA Molecule: Synthetic oligonucleotide
aacuactaccauaaacaaagcac

SEQ ID NO: 3508 - RNA, 23 nt, Artificial Sequence
  Description of Artificial Sequence: Synthetic oligonucleotide
aaaacuacuaccauaaacaaagc

SEQ ID NO: 3509 - DNA, 23 bp, Artificial Sequence
  Description of Artificial Sequence: Synthetic oligonucleotide
  Description of Combined DNA/RNA Molecule: Synthetic oligonucleotide
aaaaactacuaccauaaacaaag

SEQ ID NO: 3510 - RNA, 23 nt, Artificial Sequence
  Description of Artificial Sequence: Synthetic oligonucleotide
auacagaaaaacuacuaccauaa

SEQ ID NO: 3511 - RNA, 23 nt, Artificial Sequence
  Description of Artificial Sequence: Synthetic oligonucleotide
aguuacagaaaaacuacuaccau

SEQ ID NO: 3512 - DNA, 23 bp, Artificial Sequence
  Description of Artificial Sequence: Synthetic oligonucleotide
  Description of Combined DNA/RNA Molecule: Synthetic oligonucleotide
agugtuacagaaaaacuacuacc

SEQ ID NO: 3513 - DNA, 23 bp, Artificial Sequence
  Description of Artificial Sequence: Synthetic oligonucleotide
  Description of Combined DNA/RNA Molecule: Synthetic oligonucleotide
augugutacagaaaaacuacuac

SEQ ID NO: 3514 - DNA, 23 bp, Artificial Sequence
  Description of Artificial Sequence: Synthetic oligonucleotide
  Description of Combined DNA/RNA Molecule: Synthetic oligonucleotide
acugtgtuacagaaaaacuacua

SEQ ID NO: 3515 - DNA, 23 bp, Artificial Sequence
  Description of Artificial Sequence: Synthetic oligonucleotide
  Description of Combined DNA/RNA Molecule: Synthetic oligonucleotide
acaaggtacuuuauucuuauuuc

SEQ ID NO: 3516 - RNA, 23 nt, Artificial Sequence
  Description of Artificial Sequence: Synthetic oligonucleotide
aagucaagguacuuuauucuuau

SEQ ID NO: 3517 - DNA, 23 bp, Artificial Sequence
  Description of Artificial Sequence: Synthetic oligonucleotide
  Description of Combined DNA/RNA Molecule: Synthetic oligonucleotide
aaagtcaagguacuuuauucuua

SEQ ID NO: 3518 - DNA, 23 bp, Artificial Sequence
  Description of Artificial Sequence: Synthetic oligonucleotide
  Description of Combined DNA/RNA Molecule: Synthetic oligonucleotide
acaaagtcaagguacuuuauucu

SEQ ID NO: 3519 - RNA, 23 nt, Artificial Sequence
  Description of Artificial Sequence: Synthetic oligonucleotide
augaacaaagucaagguacuuua

SEQ ID NO: 3520 - RNA, 23 nt, Artificial Sequence
  Description of Artificial Sequence: Synthetic oligonucleotide
augugaacaaagucaagguacuu

SEQ ID NO: 3521 - DNA, 23 bp, Artificial Sequence
  Description of Artificial Sequence: Synthetic oligonucleotide
  Description of Combined DNA/RNA Molecule: Synthetic oligonucleotide
acugtgaacaaagucaagguacu

SEQ ID NO: 3522 - DNA, 23 bp, Artificial Sequence
  Description of Artificial Sequence: Synthetic oligonucleotide
  Description of Combined DNA/RNA Molecule: Synthetic oligonucleotide
augctgtgaacaaagucaaggua

SEQ ID NO: 3523 - DNA, 23 bp, Artificial Sequence
  Description of Artificial Sequence: Synthetic oligonucleotide
  Description of Combined DNA/RNA Molecule: Synthetic oligonucleotide
acaugctgugaacaaagucaagg

SEQ ID NO: 3524 - RNA, 23 nt, Artificial Sequence
  Description of Artificial Sequence: Synthetic oligonucleotide
accuacaugcugugaacaaaguc

SEQ ID NO: 3525 - DNA, 23 bp, Artificial Sequence
  Description of Artificial Sequence: Synthetic oligonucleotide
  Description of Combined DNA/RNA Molecule: Synthetic oligonucleotide
aucatcacccuacaugcugugaa

SEQ ID NO: 3526 - DNA, 23 bp, Artificial Sequence
  Description of Artificial Sequence: Synthetic oligonucleotide
  Description of Combined DNA/RNA Molecule: Synthetic oligonucleotide
agcucatcacccuacaugcugug

SEQ ID NO: 3527 - DNA, 23 bp, Artificial Sequence
  Description of Artificial Sequence: Synthetic oligonucleotide
  Description of Combined DNA/RNA Molecule: Synthetic oligonucleotide
augctcaucacccuacaugcugu

SEQ ID NO: 3528 - DNA, 23 bp, Artificial Sequence
  Description of Artificial Sequence: Synthetic oligonucleotide
  Description of Combined DNA/RNA Molecule: Synthetic oligonucleotide
aagugctcaucacccuacaugcu

SEQ ID NO: 3529 - RNA, 23 nt, Artificial Sequence
  Description of Artificial Sequence: Synthetic oligonucleotide
auuaaaagcagcauuuuagucaa

SEQ ID NO: 3530 - DNA, 23 bp, Artificial Sequence
  Description of Artificial Sequence: Synthetic oligonucleotide
  Description of Combined DNA/RNA Molecule: Synthetic oligonucleotide
augututaaaagcagcauuuuag

SEQ ID NO: 3531 - DNA, 23 bp, Artificial Sequence
  Description of Artificial Sequence: Synthetic oligonucleotide
  Description of Combined DNA/RNA Molecule: Synthetic oligonucleotide
acuatgtuuuaaaagcagcauuu

SEQ ID NO: 3532 - DNA, 23 bp, Artificial Sequence
  Description of Artificial Sequence: Synthetic oligonucleotide
  Description of Combined DNA/RNA Molecule: Synthetic oligonucleotide
aucctatguuuuaaaagcagcau

SEQ ID NO: 3533 - RNA, 23 nt, Artificial Sequence
  Description of Artificial Sequence: Synthetic oligonucleotide
auuccuauguuuuaaaagcagca

SEQ ID NO: 3534 - DNA, 23 bp, Artificial Sequence
  Description of Artificial Sequence: Synthetic oligonucleotide
  Description of Combined DNA/RNA Molecule: Synthetic oligonucleotide
auuucctauguuuuaaaagcagc

SEQ ID NO: 3535 - DNA, 23 bp, Artificial Sequence
  Description of Artificial Sequence: Synthetic oligonucleotide
  Description of Combined DNA/RNA Molecule: Synthetic oligonucleotide
auactutccuauguuuuaaaagc

SEQ ID NO: 3536 - DNA, 23 bp, Artificial Sequence
  Description of Artificial Sequence: Synthetic oligonucleotide
  Description of Combined DNA/RNA Molecule: Synthetic oligonucleotide
acautctacuuuccuauguuuua

SEQ ID NO: 3537 - DNA, 23 bp, Artificial Sequence
  Description of Artificial Sequence: Synthetic oligonucleotide
  Description of Combined DNA/RNA Molecule: Synthetic oligonucleotide
augctatggauuugcacucaacc

SEQ ID NO: 3538 - RNA, 23 nt, Artificial Sequence
  Description of Artificial Sequence: Synthetic oligonucleotide
agugcuauggauuugcacucaac

SEQ ID NO: 3539 - RNA, 23 nt, Artificial Sequence
  Description of Artificial Sequence: Synthetic oligonucleotide
auaacuagcucaauuuaucuugu

SEQ ID NO: 3540 - DNA, 23 bp, Artificial Sequence
  Description of Artificial Sequence: Synthetic oligonucleotide
  Description of Combined DNA/RNA Molecule: Synthetic oligonucleotide
auuaactagcucaauuuaucuug

SEQ ID NO: 3541 - DNA, 23 bp, Artificial Sequence
  Description of Artificial Sequence: Synthetic oligonucleotide
  Description of Combined DNA/RNA Molecule: Synthetic oligonucleotide
augccutaacuagcucaauuuau

SEQ ID NO: 3542 - DNA, 23 bp, Artificial Sequence
  Description of Artificial Sequence: Synthetic oligonucleotide
  Description of Combined DNA/RNA Molecule: Synthetic oligonucleotide
auugcctuaacuagcucaauuua

SEQ ID NO: 3543 - DNA, 23 bp, Artificial Sequence
  Description of Artificial Sequence: Synthetic oligonucleotide
  Description of Combined DNA/RNA Molecule: Synthetic oligonucleotide
augatutgccuuaacuagcucaa

SEQ ID NO: 3544 - DNA, 23 bp, Artificial Sequence
  Description of Artificial Sequence: Synthetic oligonucleotide
  Description of Combined DNA/RNA Molecule: Synthetic oligonucleotide
aacctgauuugccuuaacuagcu

SEQ ID NO: 3545 - DNA, 23 bp, Artificial Sequence
  Description of Artificial Sequence: Synthetic oligonucleotide
  Description of Combined DNA/RNA Molecule: Synthetic oligonucleotide
auuacctgauuugccuuaacuag

SEQ ID NO: 3546 - DNA, 23 bp, Artificial Sequence
  Description of Artificial Sequence: Synthetic oligonucleotide
  Description of Combined DNA/RNA Molecule: Synthetic oligonucleotide
aauutuaccugauuugccuuaac

SEQ ID NO: 3547 - DNA, 23 bp, Artificial Sequence
  Description of Artificial Sequence: Synthetic oligonucleotide
  Description of Combined DNA/RNA Molecule: Synthetic oligonucleotide
auaututaccugauuugccuuaa

SEQ ID NO: 3548 - DNA, 23 bp, Artificial Sequence
  Description of Artificial Sequence: Synthetic oligonucleotide
  Description of Combined DNA/RNA Molecule: Synthetic oligonucleotide
agactatuuuaccugauuugccu

SEQ ID NO: 3549 - RNA, 23 nt, Artificial Sequence
  Description of Artificial Sequence: Synthetic oligonucleotide
augacuauuuuaccugauuugcc

SEQ ID NO: 3550 - DNA, 23 bp, Artificial Sequence
  Description of Artificial Sequence: Synthetic oligonucleotide
  Description of Combined DNA/RNA Molecule: Synthetic oligonucleotide
aaugactauuuuaccugauuugc

SEQ ID NO: 3551 - DNA, 23 bp, Artificial Sequence
  Description of Artificial Sequence: Synthetic oligonucleotide
  Description of Combined DNA/RNA Molecule: Synthetic oligonucleotide
aucatgacuauuuuaccugauuu

SEQ ID NO: 3552 - DNA, 23 bp, Artificial Sequence
  Description of Artificial Sequence: Synthetic oligonucleotide
  Description of Combined DNA/RNA Molecule: Synthetic oligonucleotide
aaaucatgacuauuuuaccugau

SEQ ID NO: 3553 - DNA, 23 bp, Artificial Sequence
  Description of Artificial Sequence: Synthetic oligonucleotide
  Description of Combined DNA/RNA Molecule: Synthetic oligonucleotide
agaatcaugacuauuuuaccuga

SEQ ID NO: 3554 - DNA, 23 bp, Artificial Sequence
  Description of Artificial Sequence: Synthetic oligonucleotide
  Description of Combined DNA/RNA Molecule: Synthetic oligonucleotide
auagaatcaugacuauuuuaccu

SEQ ID NO: 3555 - RNA, 23 nt, Artificial Sequence
  Description of Artificial Sequence: Synthetic oligonucleotide
aauagaaucaugacuauuuuacc

SEQ ID NO: 3556 - DNA, 23 bp, Artificial Sequence
  Description of Artificial Sequence: Synthetic oligonucleotide
  Description of Combined DNA/RNA Molecule: Synthetic oligonucleotide
auacautacauagaaucaugacu

SEQ ID NO: 3557 - DNA, 23 bp, Artificial Sequence
  Description of Artificial Sequence: Synthetic oligonucleotide
  Description of Combined DNA/RNA Molecule: Synthetic oligonucleotide
auuacatuacauagaaucaugac

SEQ ID NO: 3558 - DNA, 23 bp, Artificial Sequence
  Description of Artificial Sequence: Synthetic oligonucleotide
  Description of Combined DNA/RNA Molecule: Synthetic oligonucleotide
aggutuacauuacauagaaucau

SEQ ID NO: 3559 - DNA, 23 bp, Artificial Sequence
  Description of Artificial Sequence: Synthetic oligonucleotide
  Description of Combined DNA/RNA Molecule: Synthetic oligonucleotide
acuctgtaauucaaaagucauua

SEQ ID NO: 3560 - DNA, 23 bp, Artificial Sequence
  Description of Artificial Sequence: Synthetic oligonucleotide
  Description of Combined DNA/RNA Molecule: Synthetic oligonucleotide
aauctctguaauucaaaagucau

SEQ ID NO: 3561 - DNA, 23 bp, Artificial Sequence
  Description of Artificial Sequence: Synthetic oligonucleotide
  Description of Combined DNA/RNA Molecule: Synthetic oligonucleotide
aguatcacaacucuaauuauaac

SEQ ID NO: 3562 - DNA, 23 bp, Artificial Sequence
  Description of Artificial Sequence: Synthetic oligonucleotide
  Description of Combined DNA/RNA Molecule: Synthetic oligonucleotide
acugtatcacaacucuaauuaua

SEQ ID NO: 3563 - RNA, 23 nt, Artificial Sequence
  Description of Artificial Sequence: Synthetic oligonucleotide
aucuguaucacaacucuaauuau

SEQ ID NO: 3564 - DNA, 23 bp, Artificial Sequence
  Description of Artificial Sequence: Synthetic oligonucleotide
  Description of Combined DNA/RNA Molecule: Synthetic oligonucleotide
acuctgtaucacaacucuaauua

SEQ ID NO: 3565 - DNA, 23 bp, Artificial Sequence
  Description of Artificial Sequence: Synthetic oligonucleotide
  Description of Combined DNA/RNA Molecule: Synthetic oligonucleotide
auactctguaucacaacucuaau

SEQ ID NO: 3566 - DNA, 23 bp, Artificial Sequence
  Description of Artificial Sequence: Synthetic oligonucleotide
  Description of Combined DNA/RNA Molecule: Synthetic oligonucleotide
auauactcuguaucacaacucua

SEQ ID NO: 3567 - RNA, 23 nt, Artificial Sequence
  Description of Artificial Sequence: Synthetic oligonucleotide
aaauauacucuguaucacaacuc

SEQ ID NO: 3568 - DNA, 23 bp, Artificial Sequence
  Description of Artificial Sequence: Synthetic oligonucleotide
  Description of Combined DNA/RNA Molecule: Synthetic oligonucleotide
auaugatauauugucugaaugga

SEQ ID NO: 3569 - DNA, 23 bp, Artificial Sequence
  Description of Artificial Sequence: Synthetic oligonucleotide
  Description of Combined DNA/RNA Molecule: Synthetic oligonucleotide
auuatgauauauugucugaaugg

SEQ ID NO: 3570 - RNA, 21 nt, Artificial Sequence
  Description of Artificial Sequence: Synthetic oligonucleotide
accugagcacuggcauaaggu

SEQ ID NO: 3571 - RNA, 21 nt, Artificial Sequence
  Description of Artificial Sequence: Synthetic oligonucleotide
cugagcacuggcauaaggacu

SEQ ID NO: 3572 - RNA, 21 nt, Artificial Sequence
  Description of Artificial Sequence: Synthetic oligonucleotide
ugacaucgacacucauacagu

SEQ ID NO: 3573 - RNA, 21 nt, Artificial Sequence
  Description of Artificial Sequence: Synthetic oligonucleotide
cacucauacagccaaguaugu

SEQ ID NO: 3574 - RNA, 21 nt, Artificial Sequence
  Description of Artificial Sequence: Synthetic oligonucleotide
acucauacagccaaguaugau

SEQ ID NO: 3575 - RNA, 21 nt, Artificial Sequence
  Description of Artificial Sequence: Synthetic oligonucleotide
cucauacagccaaguaugacu

SEQ ID NO: 3576 - RNA, 21 nt, Artificial Sequence
  Description of Artificial Sequence: Synthetic oligonucleotide
ccaaguaugacccuucccugu

SEQ ID NO: 3577 - RNA, 21 nt, Artificial Sequence
  Description of Artificial Sequence: Synthetic oligonucleotide
cugaggauccucaacaauggu

SEQ ID NO: 3578 - RNA, 21 nt, Artificial Sequence
  Description of Artificial Sequence: Synthetic oligonucleotide
ugaggauccucaacaaugguu

SEQ ID NO: 3579 - RNA, 21 nt, Artificial Sequence
  Description of Artificial Sequence: Synthetic oligonucleotide
gaggauccucaacaauggucu

SEQ ID NO: 3580 - RNA, 21 nt, Artificial Sequence
  Description of Artificial Sequence: Synthetic oligonucleotide
ugcuuucaacguggaguuugu

SEQ ID NO: 3581 - RNA, 21 nt, Artificial Sequence
  Description of Artificial Sequence: Synthetic oligonucleotide
gcuuucaacguggaguuugau

SEQ ID NO: 3582 - RNA, 21 nt, Artificial Sequence
  Description of Artificial Sequence: Synthetic oligonucleotide
cuuucaacguggaguuugauu

SEQ ID NO: 3583 - RNA, 21 nt, Artificial Sequence
  Description of Artificial Sequence: Synthetic oligonucleotide
uuucaacguggaguuugaugu

SEQ ID NO: 3584 - RNA, 21 nt, Artificial Sequence
  Description of Artificial Sequence: Synthetic oligonucleotide
ggaguuugaugacucucaggu

SEQ ID NO: 3585 - RNA, 21 nt, Artificial Sequence
  Description of Artificial Sequence: Synthetic oligonucleotide
ugacucucaggacaaagcagu

SEQ ID NO: 3586 - RNA, 21 nt, Artificial Sequence
  Description of Artificial Sequence: Synthetic oligonucleotide
aacuucacuugguucacuggu

SEQ ID NO: 3587 - RNA, 21 nt, Artificial Sequence
  Description of Artificial Sequence: Synthetic oligonucleotide
cugauggacuggccguucuau

SEQ ID NO: 3588 - RNA, 21 nt, Artificial Sequence
  Description of Artificial Sequence: Synthetic oligonucleotide
ugauggacuggccguucuagu

SEQ ID NO: 3589 - RNA, 21 nt, Artificial Sequence
  Description of Artificial Sequence: Synthetic oligonucleotide
gauggacuggccguucuaggu

SEQ ID NO: 3590 - RNA, 21 nt, Artificial Sequence
  Description of Artificial Sequence: Synthetic oligonucleotide
auggacuggccguucuagguu

SEQ ID NO: 3591 - RNA, 21 nt, Artificial Sequence
  Description of Artificial Sequence: Synthetic oligonucleotide
gacuggccguucuagguauuu

SEQ ID NO: 3592 - RNA, 21 nt, Artificial Sequence
  Description of Artificial Sequence: Synthetic oligonucleotide
acuggccguucuagguauuuu

SEQ ID NO: 3593 - RNA, 21 nt, Artificial Sequence
  Description of Artificial Sequence: Synthetic oligonucleotide
cuggccguucuagguauuuuu

SEQ ID NO: 3594 - RNA, 21 nt, Artificial Sequence
  Description of Artificial Sequence: Synthetic oligonucleotide
uggccguucuagguauuuuuu

SEQ ID NO: 3595 - RNA, 21 nt, Artificial Sequence
  Description of Artificial Sequence: Synthetic oligonucleotide
ggccguucuagguauuuuuuu

SEQ ID NO: 3596 - RNA, 21 nt, Artificial Sequence
  Description of Artificial Sequence: Synthetic oligonucleotide
gccguucuagguauuuuuuuu

SEQ ID NO: 3597 - RNA, 21 nt, Artificial Sequence
  Description of Artificial Sequence: Synthetic oligonucleotide
ccguucuagguauuuuuuugu

SEQ ID NO: 3598 - RNA, 21 nt, Artificial Sequence
  Description of Artificial Sequence: Synthetic oligonucleotide
cguucuagguauuuuuuugau

SEQ ID NO: 3599 - RNA, 21 nt, Artificial Sequence
  Description of Artificial Sequence: Synthetic oligonucleotide
guucuagguauuuuuuugaau

SEQ ID NO: 3600 - RNA, 21 nt, Artificial Sequence
  Description of Artificial Sequence: Synthetic oligonucleotide
uucuagguauuuuuuugaagu

SEQ ID NO: 3601 - RNA, 21 nt, Artificial Sequence
  Description of Artificial Sequence: Synthetic oligonucleotide
ucuagguauuuuuuugaaggu

SEQ ID NO: 3602 - RNA, 21 nt, Artificial Sequence
  Description of Artificial Sequence: Synthetic oligonucleotide
uagguauuuuuuugaagguuu

SEQ ID NO: 3603 - RNA, 21 nt, Artificial Sequence
  Description of Artificial Sequence: Synthetic oligonucleotide
agguauuuuuuugaagguugu

SEQ ID NO: 3604 - RNA, 21 nt, Artificial Sequence
  Description of Artificial Sequence: Synthetic oligonucleotide
gguauuuuuuugaagguuggu

SEQ ID NO: 3605 - RNA, 21 nt, Artificial Sequence
  Description of Artificial Sequence: Synthetic oligonucleotide
guauuuuuuugaagguuggcu

SEQ ID NO: 3606 - RNA, 21 nt, Artificial Sequence
  Description of Artificial Sequence: Synthetic oligonucleotide
auuuuuuugaagguuggcagu

SEQ ID NO: 3607 - RNA, 21 nt, Artificial Sequence
  Description of Artificial Sequence: Synthetic oligonucleotide
cgggccuucagaaaguuguuu

SEQ ID NO: 3608 - RNA, 21 nt, Artificial Sequence
  Description of Artificial Sequence: Synthetic oligonucleotide
gggccuucagaaaguuguugu

SEQ ID NO: 3609 - RNA, 21 nt, Artificial Sequence
  Description of Artificial Sequence: Synthetic oligonucleotide
ggccuucagaaaguuguugau

SEQ ID NO: 3610 - RNA, 21 nt, Artificial Sequence
  Description of Artificial Sequence: Synthetic oligonucleotide
ccuucagaaaguuguugaugu

SEQ ID NO: 3611 - RNA, 21 nt, Artificial Sequence
  Description of Artificial Sequence: Synthetic oligonucleotide
cuucagaaaguuguugauguu

SEQ ID NO: 3612 - RNA, 21 nt, Artificial Sequence
  Description of Artificial Sequence: Synthetic oligonucleotide
ucagaaaguuguugaugugcu

SEQ ID NO: 3613 - RNA, 21 nt, Artificial Sequence
  Description of Artificial Sequence: Synthetic oligonucleotide
gaaaguuguugaugugcuggu

SEQ ID NO: 3614 - RNA, 21 nt, Artificial Sequence
  Description of Artificial Sequence: Synthetic oligonucleotide
auuccauuaaaacaaagggcu

SEQ ID NO: 3615 - RNA, 21 nt, Artificial Sequence
  Description of Artificial Sequence: Synthetic oligonucleotide
aacaaagggcaagagugcugu

SEQ ID NO: 3616 - RNA, 21 nt, Artificial Sequence
  Description of Artificial Sequence: Synthetic oligonucleotide
agugcugacuucacuaacuuu

SEQ ID NO: 3617 - RNA, 21 nt, Artificial Sequence
  Description of Artificial Sequence: Synthetic oligonucleotide
ugcugacuucacuaacuucgu

SEQ ID NO: 3618 - RNA, 21 nt, Artificial Sequence
  Description of Artificial Sequence: Synthetic oligonucleotide
cugacuucacuaacuucgauu

SEQ ID NO: 3619 - RNA, 21 nt, Artificial Sequence
  Description of Artificial Sequence: Synthetic oligonucleotide
ugacuucacuaacuucgaucu

SEQ ID NO: 3620 - RNA, 21 nt, Artificial Sequence
  Description of Artificial Sequence: Synthetic oligonucleotide
gacuucacuaacuucgauccu

SEQ ID NO: 3621 - RNA, 21 nt, Artificial Sequence
  Description of Artificial Sequence: Synthetic oligonucleotide
cacuaacuucgauccucgugu

SEQ ID NO: 3622 - RNA, 21 nt, Artificial Sequence
  Description of Artificial Sequence: Synthetic oligonucleotide
acuaacuucgauccucguggu

SEQ ID NO: 3623 - RNA, 21 nt, Artificial Sequence
  Description of Artificial Sequence: Synthetic oligonucleotide
ccuccuuccugaauccuuggu

SEQ ID NO: 3624 - RNA, 21 nt, Artificial Sequence
  Description of Artificial Sequence: Synthetic oligonucleotide
uccuuccugaauccuuggauu

SEQ ID NO: 3625 - RNA, 21 nt, Artificial Sequence
  Description of Artificial Sequence: Synthetic oligonucleotide
ccuuccugaauccuuggauuu

SEQ ID NO: 3626 - RNA, 21 nt, Artificial Sequence
  Description of Artificial Sequence: Synthetic oligonucleotide
cuccucuucuggaaugugugu

SEQ ID NO: 3627 - RNA, 21 nt, Artificial Sequence
  Description of Artificial Sequence: Synthetic oligonucleotide
gaaugugugaccuggauuguu

SEQ ID NO: 3628 - RNA, 21 nt, Artificial Sequence
  Description of Artificial Sequence: Synthetic oligonucleotide
ugugugaccuggauugugcuu

SEQ ID NO: 3629 - RNA, 21 nt, Artificial Sequence
  Description of Artificial Sequence: Synthetic oligonucleotide
gugcucaaggaacccaucagu

SEQ ID NO: 3630 - RNA, 21 nt, Artificial Sequence
  Description of Artificial Sequence: Synthetic oligonucleotide
ucaaggaacccaucagcgucu

SEQ ID NO: 3631 - RNA, 21 nt, Artificial Sequence
  Description of Artificial Sequence: Synthetic oligonucleotide
aaggaacccaucagcgucagu

SEQ ID NO: 3632 - RNA, 21 nt, Artificial Sequence
  Description of Artificial Sequence: Synthetic oligonucleotide
ccaucagcgucagcagcgagu

SEQ ID NO: 3633 - RNA, 21 nt, Artificial Sequence
  Description of Artificial Sequence: Synthetic oligonucleotide
gaaauuccguaaacuuaacuu

SEQ ID NO: 3634 - RNA, 21 nt, Artificial Sequence
  Description of Artificial Sequence: Synthetic oligonucleotide
aaauuccguaaacuuaacuuu

SEQ ID NO: 3635 - RNA, 21 nt, Artificial Sequence
  Description of Artificial Sequence: Synthetic oligonucleotide
ccguaaacuuaacuucaaugu

SEQ ID NO: 3636 - RNA, 21 nt, Artificial Sequence
  Description of Artificial Sequence: Synthetic oligonucleotide
cguaaacuuaacuucaauggu

SEQ ID NO: 3637 - RNA, 21 nt, Artificial Sequence
  Description of Artificial Sequence: Synthetic oligonucleotide
aacugaugguggacaacuggu

SEQ ID NO: 3638 - RNA, 21 nt, Artificial Sequence
  Description of Artificial Sequence: Synthetic oligonucleotide
cucagccacugaagaacaggu

SEQ ID NO: 3639 - RNA, 21 nt, Artificial Sequence
  Description of Artificial Sequence: Synthetic oligonucleotide
agaacaggcaaaucaaagcuu

SEQ ID NO: 3640 - RNA, 21 nt, Artificial Sequence
  Description of Artificial Sequence: Synthetic oligonucleotide
aggcaaaucaaagcuuccuuu

SEQ ID NO: 3641 - RNA, 21 nt, Artificial Sequence
  Description of Artificial Sequence: Synthetic oligonucleotide
caaagcuuccuucaaauaagu

SEQ ID NO: 3642 - RNA, 21 nt, Artificial Sequence
  Description of Artificial Sequence: Synthetic oligonucleotide
aaagcuuccuucaaauaagau

SEQ ID NO: 3643 - RNA, 21 nt, Artificial Sequence
  Description of Artificial Sequence: Synthetic oligonucleotide
aagcuuccuucaaauaagauu

SEQ ID NO: 3644 - RNA, 21 nt, Artificial Sequence
  Description of Artificial Sequence: Synthetic oligonucleotide
agcuuccuucaaauaagaugu

SEQ ID NO: 3645 - RNA, 21 nt, Artificial Sequence
  Description of Artificial Sequence: Synthetic oligonucleotide
gcuuccuucaaauaagauggu

SEQ ID NO: 3646 - RNA, 21 nt, Artificial Sequence
  Description of Artificial Sequence: Synthetic oligonucleotide
gucuguauccaaauaaugaau

SEQ ID NO: 3647 - RNA, 21 nt, Artificial Sequence
  Description of Artificial Sequence: Synthetic oligonucleotide
guauccaaauaaugaaucuuu

SEQ ID NO: 3648 - RNA, 21 nt, Artificial Sequence
  Description of Artificial Sequence: Synthetic oligonucleotide
auccaaauaaugaaucuucgu

SEQ ID NO: 3649 - RNA, 21 nt, Artificial Sequence
  Description of Artificial Sequence: Synthetic oligonucleotide
uccaaauaaugaaucuucggu

SEQ ID NO: 3650 - RNA, 21 nt, Artificial Sequence
  Description of Artificial Sequence: Synthetic oligonucleotide
ccaaauaaugaaucuucgggu

SEQ ID NO: 3651 - RNA, 21 nt, Artificial Sequence
  Description of Artificial Sequence: Synthetic oligonucleotide
caaauaaugaaucuucggguu

SEQ ID NO: 3652 - RNA, 21 nt, Artificial Sequence
  Description of Artificial Sequence: Synthetic oligonucleotide
aaauaaugaaucuucgggugu

SEQ ID NO: 3653 - RNA, 21 nt, Artificial Sequence
  Description of Artificial Sequence: Synthetic oligonucleotide
aauaaugaaucuucggguguu

SEQ ID NO: 3654 - RNA, 21 nt, Artificial Sequence
  Description of Artificial Sequence: Synthetic oligonucleotide
auaaugaaucuucggguguuu

SEQ ID NO: 3655 - RNA, 21 nt, Artificial Sequence
  Description of Artificial Sequence: Synthetic oligonucleotide
uaaugaaucuucggguguuuu

SEQ ID NO: 3656 - RNA, 21 nt, Artificial Sequence
  Description of Artificial Sequence: Synthetic oligonucleotide
ugaaucuucggguguuucccu

SEQ ID NO: 3657 - RNA, 21 nt, Artificial Sequence
  Description of Artificial Sequence: Synthetic oligonucleotide
gaaucuucggguguuucccuu

SEQ ID NO: 3658 - RNA, 21 nt, Artificial Sequence
  Description of Artificial Sequence: Synthetic oligonucleotide
aagcacagaucuaccuugguu

SEQ ID NO: 3659 - RNA, 21 nt, Artificial Sequence
  Description of Artificial Sequence: Synthetic oligonucleotide
agcacagaucuaccuuggugu

SEQ ID NO: 3660 - RNA, 21 nt, Artificial Sequence
  Description of Artificial Sequence: Synthetic oligonucleotide
gcacagaucuaccuuggugau

SEQ ID NO: 3661 - RNA, 21 nt, Artificial Sequence
  Description of Artificial Sequence: Synthetic oligonucleotide
agaucuaccuuggugauuugu

SEQ ID NO: 3662 - RNA, 21 nt, Artificial Sequence
  Description of Artificial Sequence: Synthetic oligonucleotide
acaacugcuguggcugguugu

SEQ ID NO: 3663 - RNA, 21 nt, Artificial Sequence
  Description of Artificial Sequence: Synthetic oligonucleotide
caacugcuguggcugguuggu

SEQ ID NO: 3664 - RNA, 21 nt, Artificial Sequence
  Description of Artificial Sequence: Synthetic oligonucleotide
cugcuguggcugguuggugcu

SEQ ID NO: 3665 - RNA, 21 nt, Artificial Sequence
  Description of Artificial Sequence: Synthetic oligonucleotide
guggcugguuggugcuuuguu

SEQ ID NO: 3666 - RNA, 21 nt, Artificial Sequence
  Description of Artificial Sequence: Synthetic oligonucleotide
ggcugguuggugcuuuguuuu

SEQ ID NO: 3667 - RNA, 21 nt, Artificial Sequence
  Description of Artificial Sequence: Synthetic oligonucleotide
gcugguuggugcuuuguuuau

SEQ ID NO: 3668 - RNA, 21 nt, Artificial Sequence
  Description of Artificial Sequence: Synthetic oligonucleotide
cugguuggugcuuuguuuauu

SEQ ID NO: 3669 - RNA, 21 nt, Artificial Sequence
  Description of Artificial Sequence: Synthetic oligonucleotide
ugguuggugcuuuguuuaugu

SEQ ID NO: 3670 - RNA, 21 nt, Artificial Sequence
  Description of Artificial Sequence: Synthetic oligonucleotide
gguuggugcuuuguuuauggu

SEQ ID NO: 3671 - RNA, 21 nt, Artificial Sequence
  Description of Artificial Sequence: Synthetic oligonucleotide
guuggugcuuuguuuaugguu

SEQ ID NO: 3672 - RNA, 21 nt, Artificial Sequence
  Description of Artificial Sequence: Synthetic oligonucleotide
uuggugcuuuguuuaugguau

SEQ ID NO: 3673 - RNA, 21 nt, Artificial Sequence
  Description of Artificial Sequence: Synthetic oligonucleotide
uggugcuuuguuuaugguagu

SEQ ID NO: 3674 - RNA, 21 nt, Artificial Sequence
  Description of Artificial Sequence: Synthetic oligonucleotide
ugcuuuguuuaugguaguagu

SEQ ID NO: 3675 - RNA, 21 nt, Artificial Sequence
  Description of Artificial Sequence: Synthetic oligonucleotide
uuuguuuaugguaguaguuuu

SEQ ID NO: 3676 - RNA, 21 nt, Artificial Sequence
  Description of Artificial Sequence: Synthetic oligonucleotide
uuguuuaugguaguaguuuuu

SEQ ID NO: 3677 - RNA, 21 nt, Artificial Sequence
  Description of Artificial Sequence: Synthetic oligonucleotide
guuuaugguaguaguuuuucu

SEQ ID NO: 3678 - RNA, 21 nt, Artificial Sequence
  Description of Artificial Sequence: Synthetic oligonucleotide
uuuaugguaguaguuuuucuu

SEQ ID NO: 3679 - RNA, 21 nt, Artificial Sequence
  Description of Artificial Sequence: Synthetic oligonucleotide
uuaugguaguaguuuuucugu

SEQ ID NO: 3680 - RNA, 21 nt, Artificial Sequence
  Description of Artificial Sequence: Synthetic oligonucleotide
uaugguaguaguuuuucuguu

SEQ ID NO: 3681 - RNA, 21 nt, Artificial Sequence
  Description of Artificial Sequence: Synthetic oligonucleotide
augguaguaguuuuucuguau

SEQ ID NO: 3682 - RNA, 21 nt, Artificial Sequence
  Description of Artificial Sequence: Synthetic oligonucleotide
uaguaguuuuucuguaacacu

SEQ ID NO: 3683 - RNA, 21 nt, Artificial Sequence
  Description of Artificial Sequence: Synthetic oligonucleotide
agaauaaaguaccuugacuuu

SEQ ID NO: 3684 - RNA, 21 nt, Artificial Sequence
  Description of Artificial Sequence: Synthetic oligonucleotide
aauaaaguaccuugacuuugu

SEQ ID NO: 3685 - RNA, 21 nt, Artificial Sequence
  Description of Artificial Sequence: Synthetic oligonucleotide
auaaaguaccuugacuuuguu

SEQ ID NO: 3686 - RNA, 21 nt, Artificial Sequence
  Description of Artificial Sequence: Synthetic oligonucleotide
uaaaguaccuugacuuuguuu

SEQ ID NO: 3687 - RNA, 21 nt, Artificial Sequence
  Description of Artificial Sequence: Synthetic oligonucleotide
aaaguaccuugacuuuguucu

SEQ ID NO: 3688 - RNA, 21 nt, Artificial Sequence
  Description of Artificial Sequence: Synthetic oligonucleotide
aaguaccuugacuuuguucau

SEQ ID NO: 3689 - RNA, 21 nt, Artificial Sequence
  Description of Artificial Sequence: Synthetic oligonucleotide
uaccuugacuuuguucacagu

SEQ ID NO: 3690 - RNA, 21 nt, Artificial Sequence
  Description of Artificial Sequence: Synthetic oligonucleotide
acuuuguucacagcauguagu

SEQ ID NO: 3691 - RNA, 21 nt, Artificial Sequence
  Description of Artificial Sequence: Synthetic oligonucleotide
cuuuguucacagcauguaggu

SEQ ID NO: 3692 - RNA, 21 nt, Artificial Sequence
  Description of Artificial Sequence: Synthetic oligonucleotide
uuuguucacagcauguagggu

SEQ ID NO: 3693 - RNA, 21 nt, Artificial Sequence
  Description of Artificial Sequence: Synthetic oligonucleotide
uuguucacagcauguaggguu

SEQ ID NO: 3694 - RNA, 21 nt, Artificial Sequence
  Description of Artificial Sequence: Synthetic oligonucleotide
uguucacagcauguagggugu

SEQ ID NO: 3695 - RNA, 21 nt, Artificial Sequence
  Description of Artificial Sequence: Synthetic oligonucleotide
ucacagcauguagggugaugu

SEQ ID NO: 3696 - RNA, 21 nt, Artificial Sequence
  Description of Artificial Sequence: Synthetic oligonucleotide
caacggaccugagcacuggcu

SEQ ID NO: 3697 - RNA, 21 nt, Artificial Sequence
  Description of Artificial Sequence: Synthetic oligonucleotide
acggaccugagcacuggcauu

SEQ ID NO: 3698 - RNA, 21 nt, Artificial Sequence
  Description of Artificial Sequence: Synthetic oligonucleotide
ccugagcacuggcauaaggau

SEQ ID NO: 3699 - RNA, 21 nt, Artificial Sequence
  Description of Artificial Sequence: Synthetic oligonucleotide
cugagcacuggcauaaggacu

SEQ ID NO: 3700 - RNA, 21 nt, Artificial Sequence
  Description of Artificial Sequence: Synthetic oligonucleotide
ugagcacuggcauaaggacuu

SEQ ID NO: 3701 - RNA, 21 nt, Artificial Sequence
  Description of Artificial Sequence: Synthetic oligonucleotide
gcacuggcauaaggacuuccu

SEQ ID NO: 3702 - RNA, 21 nt, Artificial Sequence
  Description of Artificial Sequence: Synthetic oligonucleotide
gacuaaaaugcugcuuuuaau

SEQ ID NO: 3703 - RNA, 21 nt, Artificial Sequence
  Description of Artificial Sequence: Synthetic oligonucleotide
acuaaaaugcugcuuuuaaau

SEQ ID NO: 3704 - RNA, 21 nt, Artificial Sequence
  Description of Artificial Sequence: Synthetic oligonucleotide
cuaaaaugcugcuuuuaaaau

SEQ ID NO: 3705 - RNA, 21 nt, Artificial Sequence
  Description of Artificial Sequence: Synthetic oligonucleotide
uaaaaugcugcuuuuaaaacu

SEQ ID NO: 3706 - RNA, 21 nt, Artificial Sequence
  Description of Artificial Sequence: Synthetic oligonucleotide
ugcugcuuuuaaaacauaggu

SEQ ID NO: 3707 - RNA, 21 nt, Artificial Sequence
  Description of Artificial Sequence: Synthetic oligonucleotide
gcugcuuuuaaaacauaggau

SEQ ID NO: 3708 - RNA, 21 nt, Artificial Sequence
  Description of Artificial Sequence: Synthetic oligonucleotide
uuuaaaacauaggaaaguagu

SEQ ID NO: 3709 - RNA, 21 nt, Artificial Sequence
  Description of Artificial Sequence: Synthetic oligonucleotide
cuguugacaucgacacucauu

SEQ ID NO: 3710 - RNA, 21 nt, Artificial Sequence
  Description of Artificial Sequence: Synthetic oligonucleotide
guugacaucgacacucauacu

SEQ ID NO: 3711 - RNA, 21 nt, Artificial Sequence
  Description of Artificial Sequence: Synthetic oligonucleotide
gacaucgacacucauacagcu

SEQ ID NO: 3712 - RNA, 21 nt, Artificial Sequence
  Description of Artificial Sequence: Synthetic oligonucleotide
acaucgacacucauacagccu

SEQ ID NO: 3713 - RNA, 21 nt, Artificial Sequence
  Description of Artificial Sequence: Synthetic oligonucleotide
aucgacacucauacagccaau

SEQ ID NO: 3714 - RNA, 21 nt, Artificial Sequence
  Description of Artificial Sequence: Synthetic oligonucleotide
acacucauacagccaaguauu

SEQ ID NO: 3715 - RNA, 21 nt, Artificial Sequence
  Description of Artificial Sequence: Synthetic oligonucleotide
cucauacagccaaguaugacu

SEQ ID NO: 3716 - RNA, 21 nt, Artificial Sequence
  Description of Artificial Sequence: Synthetic oligonucleotide
ucauacagccaaguaugaccu

SEQ ID NO: 3717 - RNA, 21 nt, Artificial Sequence
  Description of Artificial Sequence: Synthetic oligonucleotide
cauacagccaaguaugacccu

SEQ ID NO: 3718 - RNA, 21 nt, Artificial Sequence
  Description of Artificial Sequence: Synthetic oligonucleotide
uacagccaaguaugacccuuu

SEQ ID NO: 3719 - RNA, 21 nt, Artificial Sequence
  Description of Artificial Sequence: Synthetic oligonucleotide
gccaaguaugacccuucccuu

SEQ ID NO: 3720 - RNA, 21 nt, Artificial Sequence
  Description of Artificial Sequence: Synthetic oligonucleotide
gauaaauugagcuaguuaagu

SEQ ID NO: 3721 - RNA, 21 nt, Artificial Sequence
  Description of Artificial Sequence: Synthetic oligonucleotide
auaaauugagcuaguuaaggu

SEQ ID NO: 3722 - RNA, 21 nt, Artificial Sequence
  Description of Artificial Sequence: Synthetic oligonucleotide
uaaauugagcuaguuaaggcu

SEQ ID NO: 3723 - RNA, 21 nt, Artificial Sequence
  Description of Artificial Sequence: Synthetic oligonucleotide
guaugacccuucccugaagcu

SEQ ID NO: 3724 - RNA, 21 nt, Artificial Sequence
  Description of Artificial Sequence: Synthetic oligonucleotide
cugucuguuuccuaugaucau

SEQ ID NO: 3725 - RNA, 21 nt, Artificial Sequence
  Description of Artificial Sequence: Synthetic oligonucleotide
gucuguuuccuaugaucaagu

SEQ ID NO: 3726 - RNA, 21 nt, Artificial Sequence
  Description of Artificial Sequence: Synthetic oligonucleotide
ucuguuuccuaugaucaagcu

SEQ ID NO: 3727 - RNA, 21 nt, Artificial Sequence
  Description of Artificial Sequence: Synthetic oligonucleotide
uguuuccuaugaucaagcaau

SEQ ID NO: 3728 - RNA, 21 nt, Artificial Sequence
  Description of Artificial Sequence: Synthetic oligonucleotide
guuuccuaugaucaagcaacu

SEQ ID NO: 3729 - RNA, 21 nt, Artificial Sequence
  Description of Artificial Sequence: Synthetic oligonucleotide
uccuaugaucaagcaacuucu

SEQ ID NO: 3730 - RNA, 21 nt, Artificial Sequence
  Description of Artificial Sequence: Synthetic oligonucleotide
agcuaguuaaggcaaaucagu

SEQ ID NO: 3731 - RNA, 21 nt, Artificial Sequence
  Description of Artificial Sequence: Synthetic oligonucleotide
gcuaguuaaggcaaaucaggu

SEQ ID NO: 3732 - RNA, 21 nt, Artificial Sequence
  Description of Artificial Sequence: Synthetic oligonucleotide
uaaggcaaaucagguaaaauu

SEQ ID NO: 3733 - RNA, 21 nt, Artificial Sequence
  Description of Artificial Sequence: Synthetic oligonucleotide
aggcaaaucagguaaaauagu

SEQ ID NO: 3734 - RNA, 21 nt, Artificial Sequence
  Description of Artificial Sequence: Synthetic oligonucleotide
ggcaaaucagguaaaauaguu

SEQ ID NO: 3735 - RNA, 21 nt, Artificial Sequence
  Description of Artificial Sequence: Synthetic oligonucleotide
gcaaaucagguaaaauagucu

SEQ ID NO: 3736 - RNA, 21 nt, Artificial Sequence
  Description of Artificial Sequence: Synthetic oligonucleotide
guaaaauagucaugauucuau

SEQ ID NO: 3737 - RNA, 21 nt, Artificial Sequence
  Description of Artificial Sequence: Synthetic oligonucleotide
uaaaauagucaugauucuauu

SEQ ID NO: 3738 - RNA, 21 nt, Artificial Sequence
  Description of Artificial Sequence: Synthetic oligonucleotide
aaaauagucaugauucuaugu

SEQ ID NO: 3739 - RNA, 21 nt, Artificial Sequence
  Description of Artificial Sequence: Synthetic oligonucleotide
agucaugauucuauguaaugu

SEQ ID NO: 3740 - RNA, 21 nt, Artificial Sequence
  Description of Artificial Sequence: Synthetic oligonucleotide
gucaugauucuauguaauguu

SEQ ID NO: 3741 - RNA, 21 nt, Artificial Sequence
  Description of Artificial Sequence: Synthetic oligonucleotide
ucaugauucuauguaauguau

SEQ ID NO: 3742 - RNA, 21 nt, Artificial Sequence
  Description of Artificial Sequence: Synthetic oligonucleotide
cccugaggauccucaacaauu

SEQ ID NO: 3743 - RNA, 21 nt, Artificial Sequence
  Description of Artificial Sequence: Synthetic oligonucleotide
ccugaggauccucaacaaugu

SEQ ID NO: 3744 - RNA, 21 nt, Artificial Sequence
  Description of Artificial Sequence: Synthetic oligonucleotide
gaggauccucaacaauggucu

SEQ ID NO: 3745 - RNA, 21 nt, Artificial Sequence
  Description of Artificial Sequence: Synthetic oligonucleotide
aggauccucaacaauggucau

SEQ ID NO: 3746 - RNA, 21 nt, Artificial Sequence
  Description of Artificial Sequence: Synthetic oligonucleotide
ugcuuucaacguggaguuugu

SEQ ID NO: 3747 - RNA, 21 nt, Artificial Sequence
  Description of Artificial Sequence: Synthetic oligonucleotide
uucaacguggaguuugaugau

SEQ ID NO: 3748 - RNA, 21 nt, Artificial Sequence
  Description of Artificial Sequence: Synthetic oligonucleotide
caacguggaguuugaugacuu

SEQ ID NO: 3749 - RNA, 21 nt, Artificial Sequence
  Description of Artificial Sequence: Synthetic oligonucleotide
aacguggaguuugaugacucu

SEQ ID NO: 3750 - RNA, 21 nt, Artificial Sequence
  Description of Artificial Sequence: Synthetic oligonucleotide
cguggaguuugaugacucucu

SEQ ID NO: 3751 - RNA, 21 nt, Artificial Sequence
  Description of Artificial Sequence: Synthetic oligonucleotide
uggaguuugaugacucucagu

SEQ ID NO: 3752 - RNA, 21 nt, Artificial Sequence
  Description of Artificial Sequence: Synthetic oligonucleotide
gaguuugaugacucucaggau

SEQ ID NO: 3753 - RNA, 21 nt, Artificial Sequence
  Description of Artificial Sequence: Synthetic oligonucleotide
guuugaugacucucaggacau

SEQ ID NO: 3754 - RNA, 21 nt, Artificial Sequence
  Description of Artificial Sequence: Synthetic oligonucleotide
ugaugacucucaggacaaagu

SEQ ID NO: 3755 - RNA, 21 nt, Artificial Sequence
  Description of Artificial Sequence: Synthetic oligonucleotide
uaauuagaguugugauacagu

SEQ ID NO: 3756 - RNA, 21 nt, Artificial Sequence
  Description of Artificial Sequence: Synthetic oligonucleotide
guugugauacagaguauauuu

SEQ ID NO: 3757 - RNA, 21 nt, Artificial Sequence
  Description of Artificial Sequence: Synthetic oligonucleotide
uugugauacagaguauauuuu

SEQ ID NO: 3758 - RNA, 21 nt, Artificial Sequence
  Description of Artificial Sequence: Synthetic oligonucleotide
ugugauacagaguauauuucu

SEQ ID NO: 3759 - RNA, 21 nt, Artificial Sequence
  Description of Artificial Sequence: Synthetic oligonucleotide
augacucucaggacaaagcau

SEQ ID NO: 3760 - RNA, 21 nt, Artificial Sequence
  Description of Artificial Sequence: Synthetic oligonucleotide
ugacucucaggacaaagcagu

SEQ ID NO: 3761 - RNA, 21 nt, Artificial Sequence
  Description of Artificial Sequence: Synthetic oligonucleotide
ccauucagacaauauaucauu

SEQ ID NO: 3762 - RNA, 21 nt, Artificial Sequence
  Description of Artificial Sequence: Synthetic oligonucleotide
acuucacuugguucacuggau

SEQ ID NO: 3763 - RNA, 21 nt, Artificial Sequence
  Description of Artificial Sequence: Synthetic oligonucleotide
uucacuugguucacuggaacu

SEQ ID NO: 3764 - RNA, 21 nt, Artificial Sequence
  Description of Artificial Sequence: Synthetic oligonucleotide
gauuuugggaaagcugugcau

SEQ ID NO: 3765 - RNA, 21 nt, Artificial Sequence
  Description of Artificial Sequence: Synthetic oligonucleotide
uuuugggaaagcugugcagcu

SEQ ID NO: 3766 - RNA, 21 nt, Artificial Sequence
  Description of Artificial Sequence: Synthetic oligonucleotide
ugggaaagcugugcagcaacu

SEQ ID NO: 3767 - RNA, 21 nt, Artificial Sequence
  Description of Artificial Sequence: Synthetic oligonucleotide
uggacuggccguucuagguau

SEQ ID NO: 3768 - RNA, 21 nt, Artificial Sequence
  Description of Artificial Sequence: Synthetic oligonucleotide
ggacuggccguucuagguauu

SEQ ID NO: 3769 - RNA, 21 nt, Artificial Sequence
  Description of Artificial Sequence: Synthetic oligonucleotide
uagguauuuuuuugaagguuu

SEQ ID NO: 3770 - RNA, 21 nt, Artificial Sequence
  Description of Artificial Sequence: Synthetic oligonucleotide
uauuuuuuugaagguuggcau

SEQ ID NO: 3771 - RNA, 21 nt, Artificial Sequence
  Description of Artificial Sequence: Synthetic oligonucleotide
auuuuuuugaagguuggcagu

SEQ ID NO: 3772 - RNA, 21 nt, Artificial Sequence
  Description of Artificial Sequence: Synthetic oligonucleotide
uuuugaagguuggcagcgcuu

SEQ ID NO: 3773 - RNA, 21 nt, Artificial Sequence
  Description of Artificial Sequence: Synthetic oligonucleotide
aagguuggcagcgcuaaaccu

SEQ ID NO: 3774 - RNA, 21 nt, Artificial Sequence
  Description of Artificial Sequence: Synthetic oligonucleotide
cuucagaaaguuguugauguu

SEQ ID NO: 3775 - RNA, 21 nt, Artificial Sequence
  Description of Artificial Sequence: Synthetic oligonucleotide
ucagaaaguuguugaugugcu

SEQ ID NO: 3776 - RNA, 21 nt, Artificial Sequence
  Description of Artificial Sequence: Synthetic oligonucleotide
cagaaaguuguugaugugcuu

SEQ ID NO: 3777 - RNA, 21 nt, Artificial Sequence
  Description of Artificial Sequence: Synthetic oligonucleotide
gaaaguuguugaugugcuggu

SEQ ID NO: 3778 - RNA, 21 nt, Artificial Sequence
  Description of Artificial Sequence: Synthetic oligonucleotide
auuccauuaaaacaaagggcu

SEQ ID NO: 3779 - RNA, 21 nt, Artificial Sequence
  Description of Artificial Sequence: Synthetic oligonucleotide
uuccauuaaaacaaagggcau

SEQ ID NO: 3780 - RNA, 21 nt, Artificial Sequence
  Description of Artificial Sequence: Synthetic oligonucleotide
uuaaaacaaagggcaagaguu

SEQ ID NO: 3781 - RNA, 21 nt, Artificial Sequence
  Description of Artificial Sequence: Synthetic oligonucleotide
uaaaacaaagggcaagagugu

SEQ ID NO: 3782 - RNA, 21 nt, Artificial Sequence
  Description of Artificial Sequence: Synthetic oligonucleotide
aaacaaagggcaagagugcuu

SEQ ID NO: 3783 - RNA, 21 nt, Artificial Sequence
  Description of Artificial Sequence: Synthetic oligonucleotide
acaaagggcaagagugcugau

SEQ ID NO: 3784 - RNA, 21 nt, Artificial Sequence
  Description of Artificial Sequence: Synthetic oligonucleotide
aagggcaagagugcugacuuu

SEQ ID NO: 3785 - RNA, 21 nt, Artificial Sequence
  Description of Artificial Sequence: Synthetic oligonucleotide
gggcaagagugcugacuucau

SEQ ID NO: 3786 - RNA, 21 nt, Artificial Sequence
  Description of Artificial Sequence: Synthetic oligonucleotide
gcaagagugcugacuucacuu

SEQ ID NO: 3787 - RNA, 21 nt, Artificial Sequence
  Description of Artificial Sequence: Synthetic oligonucleotide
caagagugcugacuucacuau

SEQ ID NO: 3788 - RNA, 21 nt, Artificial Sequence
  Description of Artificial Sequence: Synthetic oligonucleotide
agagugcugacuucacuaacu

SEQ ID NO: 3789 - RNA, 21 nt, Artificial Sequence
  Description of Artificial Sequence: Synthetic oligonucleotide
gugcugacuucacuaacuucu

SEQ ID NO: 3790 - RNA, 21 nt, Artificial Sequence
  Description of Artificial Sequence: Synthetic oligonucleotide
ugcugacuucacuaacuucgu

SEQ ID NO: 3791 - RNA, 21 nt, Artificial Sequence
  Description of Artificial Sequence: Synthetic oligonucleotide
cuucacuaacuucgauccucu

SEQ ID NO: 3792 - RNA, 21 nt, Artificial Sequence
  Description of Artificial Sequence: Synthetic oligonucleotide
uucacuaacuucgauccucgu

SEQ ID NO: 3793 - RNA, 21 nt, Artificial Sequence
  Description of Artificial Sequence: Synthetic oligonucleotide
gccuccuuccugaauccuugu

SEQ ID NO: 3794 - RNA, 21 nt, Artificial Sequence
  Description of Artificial Sequence: Synthetic oligonucleotide
uccuuccugaauccuuggauu

SEQ ID NO: 3795 - RNA, 21 nt, Artificial Sequence
  Description of Artificial Sequence: Synthetic oligonucleotide
ggaccuacccaggcucacugu

SEQ ID NO: 3796 - RNA, 21 nt, Artificial Sequence
  Description of Artificial Sequence: Synthetic oligonucleotide
accuacccaggcucacugacu

SEQ ID NO: 3797 - RNA, 21 nt, Artificial Sequence
  Description of Artificial Sequence: Synthetic oligonucleotide
cuacccaggcucacugaccau

SEQ ID NO: 3798 - RNA, 21 nt, Artificial Sequence
  Description of Artificial Sequence: Synthetic oligonucleotide
acccaggcucacugaccaccu

SEQ ID NO: 3799 - RNA, 21 nt, Artificial Sequence
  Description of Artificial Sequence: Synthetic oligonucleotide
cuccucuucuggaaugugugu

SEQ ID NO: 3800 - RNA, 21 nt, Artificial Sequence
  Description of Artificial Sequence: Synthetic oligonucleotide
ccucuucuggaaugugugacu

SEQ ID NO: 3801 - RNA, 21 nt, Artificial Sequence
  Description of Artificial Sequence: Synthetic oligonucleotide
ucuucuggaaugugugaccuu

SEQ ID NO: 3802 - RNA, 21 nt, Artificial Sequence
  Description of Artificial Sequence: Synthetic oligonucleotide
uucuggaaugugugaccuggu

SEQ ID NO: 3803 - RNA, 21 nt, Artificial Sequence
  Description of Artificial Sequence: Synthetic oligonucleotide
uggaaugugugaccuggauuu

SEQ ID NO: 3804 - RNA, 21 nt, Artificial Sequence
  Description of Artificial Sequence: Synthetic oligonucleotide
ugugugaccuggauugugcuu

SEQ ID NO: 3805 - RNA, 21 nt, Artificial Sequence
  Description of Artificial Sequence: Synthetic oligonucleotide
ugugaccuggauugugcucau

SEQ ID NO: 3806 - RNA, 21 nt, Artificial Sequence
  Description of Artificial Sequence: Synthetic oligonucleotide
gaccuggauugugcucaaggu

SEQ ID NO: 3807 - RNA, 21 nt, Artificial Sequence
  Description of Artificial Sequence: Synthetic oligonucleotide
ccuggauugugcucaaggaau

SEQ ID NO: 3808 - RNA, 21 nt, Artificial Sequence
  Description of Artificial Sequence: Synthetic oligonucleotide
cuggauugugcucaaggaacu

SEQ ID NO: 3809 - RNA, 21 nt, Artificial Sequence
  Description of Artificial Sequence: Synthetic oligonucleotide
gauugugcucaaggaacccau

SEQ ID NO: 3810 - RNA, 21 nt, Artificial Sequence
  Description of Artificial Sequence: Synthetic oligonucleotide
auugugcucaaggaacccauu

SEQ ID NO: 3811 - RNA, 21 nt, Artificial Sequence
  Description of Artificial Sequence: Synthetic oligonucleotide
ugcucaaggaacccaucagcu

SEQ ID NO: 3812 - RNA, 21 nt, Artificial Sequence
  Description of Artificial Sequence: Synthetic oligonucleotide
gcucaaggaacccaucagcgu

SEQ ID NO: 3813 - RNA, 21 nt, Artificial Sequence
  Description of Artificial Sequence: Synthetic oligonucleotide
ucaaggaacccaucagcgucu

SEQ ID NO: 3814 - RNA, 21 nt, Artificial Sequence
  Description of Artificial Sequence: Synthetic oligonucleotide
ggaacccaucagcgucagcau

SEQ ID NO: 3815 - RNA, 21 nt, Artificial Sequence
  Description of Artificial Sequence: Synthetic oligonucleotide
aacccaucagcgucagcagcu

SEQ ID NO: 3816 - RNA, 21 nt, Artificial Sequence
  Description of Artificial Sequence: Synthetic oligonucleotide
uugaaauuccguaaacuuaau

SEQ ID NO: 3817 - RNA, 21 nt, Artificial Sequence
  Description of Artificial Sequence: Synthetic oligonucleotide
gaaauuccguaaacuuaacuu

SEQ ID NO: 3818 - RNA, 21 nt, Artificial Sequence
  Description of Artificial Sequence: Synthetic oligonucleotide
aauuccguaaacuuaacuucu

SEQ ID NO: 3819 - RNA, 21 nt, Artificial Sequence
  Description of Artificial Sequence: Synthetic oligonucleotide
auuccguaaacuuaacuucau

SEQ ID NO: 3820 - RNA, 21 nt, Artificial Sequence
  Description of Artificial Sequence: Synthetic oligonucleotide
uccguaaacuuaacuucaauu

SEQ ID NO: 3821 - RNA, 21 nt, Artificial Sequence
  Description of Artificial Sequence: Synthetic oligonucleotide
ccguaaacuuaacuucaaugu

SEQ ID NO: 3822 - RNA, 21 nt, Artificial Sequence
  Description of Artificial Sequence: Synthetic oligonucleotide
cgaagaacugaugguggacau

SEQ ID NO: 3823 - RNA, 21 nt, Artificial Sequence
  Description of Artificial Sequence: Synthetic oligonucleotide
agaacugaugguggacaacuu

SEQ ID NO: 3824 - RNA, 21 nt, Artificial Sequence
  Description of Artificial Sequence: Synthetic oligonucleotide
aacugaugguggacaacuggu

SEQ ID NO: 3825 - RNA, 21 nt, Artificial Sequence
  Description of Artificial Sequence: Synthetic oligonucleotide
acugaugguggacaacuggcu

SEQ ID NO: 3826 - RNA, 21 nt, Artificial Sequence
  Description of Artificial Sequence: Synthetic oligonucleotide
ugaugguggacaacuggcgcu

SEQ ID NO: 3827 - RNA, 21 nt, Artificial Sequence
  Description of Artificial Sequence: Synthetic oligonucleotide
cagcucagccacugaagaacu

SEQ ID NO: 3828 - RNA, 21 nt, Artificial Sequence
  Description of Artificial Sequence: Synthetic oligonucleotide
agcucagccacugaagaacau

SEQ ID NO: 3829 - RNA, 21 nt, Artificial Sequence
  Description of Artificial Sequence: Synthetic oligonucleotide
cucagccacugaagaacaggu

SEQ ID NO: 3830 - RNA, 21 nt, Artificial Sequence
  Description of Artificial Sequence: Synthetic oligonucleotide
ucagccacugaagaacaggcu

SEQ ID NO: 3831 - RNA, 21 nt, Artificial Sequence
  Description of Artificial Sequence: Synthetic oligonucleotide
agccacugaagaacaggcaau

SEQ ID NO: 3832 - RNA, 21 nt, Artificial Sequence
  Description of Artificial Sequence: Synthetic oligonucleotide
acugaagaacaggcaaaucau

SEQ ID NO: 3833 - RNA, 21 nt, Artificial Sequence
  Description of Artificial Sequence: Synthetic oligonucleotide
cugaagaacaggcaaaucaau

SEQ ID NO: 3834 - RNA, 21 nt, Artificial Sequence
  Description of Artificial Sequence: Synthetic oligonucleotide
ugaagaacaggcaaaucaaau

SEQ ID NO: 3835 - RNA, 21 nt, Artificial Sequence
  Description of Artificial Sequence: Synthetic oligonucleotide
gaagaacaggcaaaucaaagu

SEQ ID NO: 3836 - RNA, 21 nt, Artificial Sequence
  Description of Artificial Sequence: Synthetic oligonucleotide
agaacaggcaaaucaaagcuu

SEQ ID NO: 3837 - RNA, 21 nt, Artificial Sequence
  Description of Artificial Sequence: Synthetic oligonucleotide
gaacaggcaaaucaaagcuuu

SEQ ID NO: 3838 - RNA, 21 nt, Artificial Sequence
  Description of Artificial Sequence: Synthetic oligonucleotide
aacaggcaaaucaaagcuucu

SEQ ID NO: 3839 - RNA, 21 nt, Artificial Sequence
  Description of Artificial Sequence: Synthetic oligonucleotide
aggcaaaucaaagcuuccuuu

SEQ ID NO: 3840 - RNA, 21 nt, Artificial Sequence
  Description of Artificial Sequence: Synthetic oligonucleotide
ggcaaaucaaagcuuccuucu

SEQ ID NO: 3841 - RNA, 21 nt, Artificial Sequence
  Description of Artificial Sequence: Synthetic oligonucleotide
aaaucaaagcuuccuucaaau

SEQ ID NO: 3842 - RNA, 21 nt, Artificial Sequence
  Description of Artificial Sequence: Synthetic oligonucleotide
aaucaaagcuuccuucaaauu

SEQ ID NO: 3843 - RNA, 21 nt, Artificial Sequence
  Description of Artificial Sequence: Synthetic oligonucleotide
ucaaagcuuccuucaaauaau

SEQ ID NO: 3844 - RNA, 21 nt, Artificial Sequence
  Description of Artificial Sequence: Synthetic oligonucleotide
aaagcuuccuucaaauaagau

SEQ ID NO: 3845 - RNA, 21 nt, Artificial Sequence
  Description of Artificial Sequence: Synthetic oligonucleotide
aagcuuccuucaaauaagauu

SEQ ID NO: 3846 - RNA, 21 nt, Artificial Sequence
  Description of Artificial Sequence: Synthetic oligonucleotide
gcuuccuucaaauaagauggu

SEQ ID NO: 3847 - RNA, 21 nt, Artificial Sequence
  Description of Artificial Sequence: Synthetic oligonucleotide
uuccuucaaauaagauggucu

SEQ ID NO: 3848 - RNA, 21 nt, Artificial Sequence
  Description of Artificial Sequence: Synthetic oligonucleotide
uccuucaaauaagaugguccu

SEQ ID NO: 3849 - RNA, 21 nt, Artificial Sequence
  Description of Artificial Sequence: Synthetic oligonucleotide
uucaaauaagauggucccauu

SEQ ID NO: 3850 - RNA, 21 nt, Artificial Sequence
  Description of Artificial Sequence: Synthetic oligonucleotide
gucuguauccaaauaaugaau

SEQ ID NO: 3851 - RNA, 21 nt, Artificial Sequence
  Description of Artificial Sequence: Synthetic oligonucleotide
ucuguauccaaauaaugaauu

SEQ ID NO: 3852 - RNA, 21 nt, Artificial Sequence
  Description of Artificial Sequence: Synthetic oligonucleotide
cuguauccaaauaaugaaucu

SEQ ID NO: 3853 - RNA, 21 nt, Artificial Sequence
  Description of Artificial Sequence: Synthetic oligonucleotide
guauccaaauaaugaaucuuu

SEQ ID NO: 3854 - RNA, 21 nt, Artificial Sequence
  Description of Artificial Sequence: Synthetic oligonucleotide
uauccaaauaaugaaucuucu

SEQ ID NO: 3855 - RNA, 21 nt, Artificial Sequence
  Description of Artificial Sequence: Synthetic oligonucleotide
auccaaauaaugaaucuucgu

SEQ ID NO: 3856 - RNA, 21 nt, Artificial Sequence
  Description of Artificial Sequence: Synthetic oligonucleotide
aaugaaucuucggguguuucu

SEQ ID NO: 3857 - RNA, 21 nt, Artificial Sequence
  Description of Artificial Sequence: Synthetic oligonucleotide
ugaaucuucggguguuucccu

SEQ ID NO: 3858 - RNA, 21 nt, Artificial Sequence
  Description of Artificial Sequence: Synthetic oligonucleotide
uuagcuaagcacagaucuacu

SEQ ID NO: 3859 - RNA, 21 nt, Artificial Sequence
  Description of Artificial Sequence: Synthetic oligonucleotide
uagcuaagcacagaucuaccu

SEQ ID NO: 3860 - RNA, 21 nt, Artificial Sequence
  Description of Artificial Sequence: Synthetic oligonucleotide
gcuaagcacagaucuaccuuu

SEQ ID NO: 3861 - RNA, 21 nt, Artificial Sequence
  Description of Artificial Sequence: Synthetic oligonucleotide
cuaagcacagaucuaccuugu

SEQ ID NO: 3862 - RNA, 21 nt, Artificial Sequence
  Description of Artificial Sequence: Synthetic oligonucleotide
cagaucuaccuuggugauuuu

SEQ ID NO: 3863 - RNA, 21 nt, Artificial Sequence
  Description of Artificial Sequence: Synthetic oligonucleotide
aauaaaaugugaagacuagau

SEQ ID NO: 3864 - RNA, 21 nt, Artificial Sequence
  Description of Artificial Sequence: Synthetic oligonucleotide
acaacugcuguggcugguugu

SEQ ID NO: 3865 - RNA, 21 nt, Artificial Sequence
  Description of Artificial Sequence: Synthetic oligonucleotide
cuguggcugguuggugcuuuu

SEQ ID NO: 3866 - RNA, 21 nt, Artificial Sequence
  Description of Artificial Sequence: Synthetic oligonucleotide
uuggugcuuuguuuaugguau

SEQ ID NO: 3867 - RNA, 21 nt, Artificial Sequence
  Description of Artificial Sequence: Synthetic oligonucleotide
gcuuuguuuaugguaguaguu

SEQ ID NO: 3868 - RNA, 21 nt, Artificial Sequence
  Description of Artificial Sequence: Synthetic oligonucleotide
uuuguuuaugguaguaguuuu

SEQ ID NO: 3869 - RNA, 21 nt, Artificial Sequence
  Description of Artificial Sequence: Synthetic oligonucleotide
uuguuuaugguaguaguuuuu

SEQ ID NO: 3870 - RNA, 21 nt, Artificial Sequence
  Description of Artificial Sequence: Synthetic oligonucleotide
augguaguaguuuuucuguau

SEQ ID NO: 3871 - RNA, 21 nt, Artificial Sequence
  Description of Artificial Sequence: Synthetic oligonucleotide
gguaguaguuuuucuguaacu

SEQ ID NO: 3872 - RNA, 21 nt, Artificial Sequence
  Description of Artificial Sequence: Synthetic oligonucleotide
uaguaguuuuucuguaacacu

SEQ ID NO: 3873 - RNA, 21 nt, Artificial Sequence
  Description of Artificial Sequence: Synthetic oligonucleotide
aguaguuuuucuguaacacau

SEQ ID NO: 3874 - RNA, 21 nt, Artificial Sequence
  Description of Artificial Sequence: Synthetic oligonucleotide
guaguuuuucuguaacacagu

SEQ ID NO: 3875 - RNA, 21 nt, Artificial Sequence
  Description of Artificial Sequence: Synthetic oligonucleotide
aauaagaauaaaguaccuugu

SEQ ID NO: 3876 - RNA, 21 nt, Artificial Sequence
  Description of Artificial Sequence: Synthetic oligonucleotide
aagaauaaaguaccuugacuu

SEQ ID NO: 3877 - RNA, 21 nt, Artificial Sequence
  Description of Artificial Sequence: Synthetic oligonucleotide
agaauaaaguaccuugacuuu

SEQ ID NO: 3878 - RNA, 21 nt, Artificial Sequence
  Description of Artificial Sequence: Synthetic oligonucleotide
aauaaaguaccuugacuuugu

SEQ ID NO: 3879 - RNA, 21 nt, Artificial Sequence
  Description of Artificial Sequence: Synthetic oligonucleotide
aaguaccuugacuuuguucau

SEQ ID NO: 3880 - RNA, 21 nt, Artificial Sequence
  Description of Artificial Sequence: Synthetic oligonucleotide
guaccuugacuuuguucacau

SEQ ID NO: 3881 - RNA, 21 nt, Artificial Sequence
  Description of Artificial Sequence: Synthetic oligonucleotide
uaccuugacuuuguucacagu

SEQ ID NO: 3882 - RNA, 21 nt, Artificial Sequence
  Description of Artificial Sequence: Synthetic oligonucleotide
ccuugacuuuguucacagcau

SEQ ID NO: 3883 - RNA, 21 nt, Artificial Sequence
  Description of Artificial Sequence: Synthetic oligonucleotide
uugacuuuguucacagcaugu

SEQ ID NO: 3884 - RNA, 21 nt, Artificial Sequence
  Description of Artificial Sequence: Synthetic oligonucleotide
cuuuguucacagcauguaggu

SEQ ID NO: 3885 - RNA, 21 nt, Artificial Sequence
  Description of Artificial Sequence: Synthetic oligonucleotide
cacagcauguagggugaugau

SEQ ID NO: 3886 - RNA, 21 nt, Artificial Sequence
  Description of Artificial Sequence: Synthetic oligonucleotide
cagcauguagggugaugagcu

SEQ ID NO: 3887 - RNA, 21 nt, Artificial Sequence
  Description of Artificial Sequence: Synthetic oligonucleotide
agcauguagggugaugagcau

SEQ ID NO: 3888 - RNA, 21 nt, Artificial Sequence
  Description of Artificial Sequence: Synthetic oligonucleotide
cauguagggugaugagcacuu

SEQ ID NO: 3889 - RNA, 21 nt, Artificial Sequence
  Description of Artificial Sequence: Synthetic oligonucleotide
gacuaaaaugcugcuuuuaau

SEQ ID NO: 3890 - RNA, 21 nt, Artificial Sequence
  Description of Artificial Sequence: Synthetic oligonucleotide
aaaaugcugcuuuuaaaacau

SEQ ID NO: 3891 - RNA, 21 nt, Artificial Sequence
  Description of Artificial Sequence: Synthetic oligonucleotide
augcugcuuuuaaaacauagu

SEQ ID NO: 3892 - RNA, 21 nt, Artificial Sequence
  Description of Artificial Sequence: Synthetic oligonucleotide
gcugcuuuuaaaacauaggau

SEQ ID NO: 3893 - RNA, 21 nt, Artificial Sequence
  Description of Artificial Sequence: Synthetic oligonucleotide
cugcuuuuaaaacauaggaau

SEQ ID NO: 3894 - RNA, 21 nt, Artificial Sequence
  Description of Artificial Sequence: Synthetic oligonucleotide
ugcuuuuaaaacauaggaaau

SEQ ID NO: 3895 - RNA, 21 nt, Artificial Sequence
  Description of Artificial Sequence: Synthetic oligonucleotide
uuuuaaaacauaggaaaguau

SEQ ID NO: 3896 - RNA, 21 nt, Artificial Sequence
  Description of Artificial Sequence: Synthetic oligonucleotide
aaacauaggaaaguagaaugu

SEQ ID NO: 3897 - RNA, 21 nt, Artificial Sequence
  Description of Artificial Sequence: Synthetic oligonucleotide
uugagugcaaauccauagcau

SEQ ID NO: 3898 - RNA, 21 nt, Artificial Sequence
  Description of Artificial Sequence: Synthetic oligonucleotide
ugagugcaaauccauagcacu

SEQ ID NO: 3899 - RNA, 21 nt, Artificial Sequence
  Description of Artificial Sequence: Synthetic oligonucleotide
aagauaaauugagcuaguuau

SEQ ID NO: 3900 - RNA, 21 nt, Artificial Sequence
  Description of Artificial Sequence: Synthetic oligonucleotide
agauaaauugagcuaguuaau

SEQ ID NO: 3901 - RNA, 21 nt, Artificial Sequence
  Description of Artificial Sequence: Synthetic oligonucleotide
aaauugagcuaguuaaggcau

SEQ ID NO: 3902 - RNA, 21 nt, Artificial Sequence
  Description of Artificial Sequence: Synthetic oligonucleotide
aauugagcuaguuaaggcaau

SEQ ID NO: 3903 - RNA, 21 nt, Artificial Sequence
  Description of Artificial Sequence: Synthetic oligonucleotide
gagcuaguuaaggcaaaucau

SEQ ID NO: 3904 - RNA, 21 nt, Artificial Sequence
  Description of Artificial Sequence: Synthetic oligonucleotide
cuaguuaaggcaaaucagguu

SEQ ID NO: 3905 - RNA, 21 nt, Artificial Sequence
  Description of Artificial Sequence: Synthetic oligonucleotide
aguuaaggcaaaucagguaau

SEQ ID NO: 3906 - RNA, 21 nt, Artificial Sequence
  Description of Artificial Sequence: Synthetic oligonucleotide
uaaggcaaaucagguaaaauu

SEQ ID NO: 3907 - RNA, 21 nt, Artificial Sequence
  Description of Artificial Sequence: Synthetic oligonucleotide
aaggcaaaucagguaaaauau

SEQ ID NO: 3908 - RNA, 21 nt, Artificial Sequence
  Description of Artificial Sequence: Synthetic oligonucleotide
gcaaaucagguaaaauagucu

SEQ ID NO: 3909 - RNA, 21 nt, Artificial Sequence
  Description of Artificial Sequence: Synthetic oligonucleotide
caaaucagguaaaauagucau

SEQ ID NO: 3910 - RNA, 21 nt, Artificial Sequence
  Description of Artificial Sequence: Synthetic oligonucleotide
aaaucagguaaaauagucauu

SEQ ID NO: 3911 - RNA, 21 nt, Artificial Sequence
  Description of Artificial Sequence: Synthetic oligonucleotide
aucagguaaaauagucaugau

SEQ ID NO: 3912 - RNA, 21 nt, Artificial Sequence
  Description of Artificial Sequence: Synthetic oligonucleotide
cagguaaaauagucaugauuu

SEQ ID NO: 3913 - RNA, 21 nt, Artificial Sequence
  Description of Artificial Sequence: Synthetic oligonucleotide
agguaaaauagucaugauucu

SEQ ID NO: 3914 - RNA, 21 nt, Artificial Sequence
  Description of Artificial Sequence: Synthetic oligonucleotide
guaaaauagucaugauucuau

SEQ ID NO: 3915 - RNA, 21 nt, Artificial Sequence
  Description of Artificial Sequence: Synthetic oligonucleotide
uaaaauagucaugauucuauu

SEQ ID NO: 3916 - RNA, 21 nt, Artificial Sequence
  Description of Artificial Sequence: Synthetic oligonucleotide
ucaugauucuauguaauguau

SEQ ID NO: 3917 - RNA, 21 nt, Artificial Sequence
  Description of Artificial Sequence: Synthetic oligonucleotide
caugauucuauguaauguaau

SEQ ID NO: 3918 - RNA, 21 nt, Artificial Sequence
  Description of Artificial Sequence: Synthetic oligonucleotide
gauucuauguaauguaaaccu

SEQ ID NO: 3919 - RNA, 21 nt, Artificial Sequence
  Description of Artificial Sequence: Synthetic oligonucleotide
augacuuuugaauuacagagu

SEQ ID NO: 3920 - RNA, 21 nt, Artificial Sequence
  Description of Artificial Sequence: Synthetic oligonucleotide
gacuuuugaauuacagagauu

SEQ ID NO: 3921 - RNA, 21 nt, Artificial Sequence
  Description of Artificial Sequence: Synthetic oligonucleotide
uauaauuagaguugugauacu

SEQ ID NO: 3922 - RNA, 21 nt, Artificial Sequence
  Description of Artificial Sequence: Synthetic oligonucleotide
uaauuagaguugugauacagu

SEQ ID NO: 3923 - RNA, 21 nt, Artificial Sequence
  Description of Artificial Sequence: Synthetic oligonucleotide
aauuagaguugugauacagau

SEQ ID NO: 3924 - RNA, 21 nt, Artificial Sequence
  Description of Artificial Sequence: Synthetic oligonucleotide
auuagaguugugauacagagu

SEQ ID NO: 3925 - RNA, 21 nt, Artificial Sequence
  Description of Artificial Sequence: Synthetic oligonucleotide
uagaguugugauacagaguau

SEQ ID NO: 3926 - RNA, 21 nt, Artificial Sequence
  Description of Artificial Sequence: Synthetic oligonucleotide
gaguugugauacagaguauau

SEQ ID NO: 3927 - RNA, 21 nt, Artificial Sequence
  Description of Artificial Sequence: Synthetic oligonucleotide
guugugauacagaguauauuu

SEQ ID NO: 3928 - RNA, 21 nt, Artificial Sequence
  Description of Artificial Sequence: Synthetic oligonucleotide
cauucagacaauauaucauau

SEQ ID NO: 3929 - RNA, 21 nt, Artificial Sequence
  Description of Artificial Sequence: Synthetic oligonucleotide
auucagacaauauaucauaau

SEQ ID NO: 3930 - RNA, 23 nt, Artificial Sequence
  Description of Artificial Sequence: Synthetic oligonucleotide
accuuaugccagugcucaggucc

SEQ ID NO: 3931 - RNA, 23 nt, Artificial Sequence
  Description of Artificial Sequence: Synthetic oligonucleotide
aguccuuaugccagugcucaggu

SEQ ID NO: 3932 - RNA, 23 nt, Artificial Sequence
  Description of Artificial Sequence: Synthetic oligonucleotide
acuguaugagugucgaugucaac

SEQ ID NO: 3933 - RNA, 23 nt, Artificial Sequence
  Description of Artificial Sequence: Synthetic oligonucleotide
acauacuuggcuguaugaguguc

SEQ ID NO: 3934 - RNA, 23 nt, Artificial Sequence
  Description of Artificial Sequence: Synthetic oligonucleotide
aucauacuuggcuguaugagugu

SEQ ID NO: 3935 - RNA, 23 nt, Artificial Sequence
  Description of Artificial Sequence: Synthetic oligonucleotide
agucauacuuggcuguaugagug

SEQ ID NO: 3936 - RNA, 23 nt, Artificial Sequence
  Description of Artificial Sequence: Synthetic oligonucleotide
acagggaagggucauacuuggcu

SEQ ID NO: 3937 - RNA, 23 nt, Artificial Sequence
  Description of Artificial Sequence: Synthetic oligonucleotide
accauuguugaggauccucaggg

SEQ ID NO: 3938 - RNA, 23 nt, Artificial Sequence
  Description of Artificial Sequence: Synthetic oligonucleotide
aaccauuguugaggauccucagg

SEQ ID NO: 3939 - RNA, 23 nt, Artificial Sequence
  Description of Artificial Sequence: Synthetic oligonucleotide
agaccauuguugaggauccucag

SEQ ID NO: 3940 - RNA, 23 nt, Artificial Sequence
  Description of Artificial Sequence: Synthetic oligonucleotide
acaaacuccacguugaaagcaug

SEQ ID NO: 3941 - RNA, 23 nt, Artificial Sequence
  Description of Artificial Sequence: Synthetic oligonucleotide
aucaaacuccacguugaaagcau

SEQ ID NO: 3942 - RNA, 23 nt, Artificial Sequence
  Description of Artificial Sequence: Synthetic oligonucleotide
aaucaaacuccacguugaaagca

SEQ ID NO: 3943 - RNA, 23 nt, Artificial Sequence
  Description of Artificial Sequence: Synthetic oligonucleotide
acaucaaacuccacguugaaagc

SEQ ID NO: 3944 - RNA, 23 nt, Artificial Sequence
  Description of Artificial Sequence: Synthetic oligonucleotide
accugagagucaucaaacuccac

SEQ ID NO: 3945 - RNA, 23 nt, Artificial Sequence
  Description of Artificial Sequence: Synthetic oligonucleotide
acugcuuuguccugagagucauc

SEQ ID NO: 3946 - RNA, 23 nt, Artificial Sequence
  Description of Artificial Sequence: Synthetic oligonucleotide
accagugaaccaagugaaguucu

SEQ ID NO: 3947 - RNA, 23 nt, Artificial Sequence
  Description of Artificial Sequence: Synthetic oligonucleotide
auagaacggccaguccaucaggu

SEQ ID NO: 3948 - RNA, 23 nt, Artificial Sequence
  Description of Artificial Sequence: Synthetic oligonucleotide
acuagaacggccaguccaucagg

SEQ ID NO: 3949 - RNA, 23 nt, Artificial Sequence
  Description of Artificial Sequence: Synthetic oligonucleotide
accuagaacggccaguccaucag

SEQ ID NO: 3950 - RNA, 23 nt, Artificial Sequence
  Description of Artificial Sequence: Synthetic oligonucleotide
aaccuagaacggccaguccauca

SEQ ID NO: 3951 - RNA, 23 nt, Artificial Sequence
  Description of Artificial Sequence: Synthetic oligonucleotide
aaauaccuagaacggccagucca

SEQ ID NO: 3952 - RNA, 23 nt, Artificial Sequence
  Description of Artificial Sequence: Synthetic oligonucleotide
aaaauaccuagaacggccagucc

SEQ ID NO: 3953 - RNA, 23 nt, Artificial Sequence
  Description of Artificial Sequence: Synthetic oligonucleotide
aaaaauaccuagaacggccaguc

SEQ ID NO: 3954 - RNA, 23 nt, Artificial Sequence
  Description of Artificial Sequence: Synthetic oligonucleotide
aaaaaauaccuagaacggccagu

SEQ ID NO: 3955 - RNA, 23 nt, Artificial Sequence
  Description of Artificial Sequence: Synthetic oligonucleotide
aaaaaaauaccuagaacggccag

SEQ ID NO: 3956 - RNA, 23 nt, Artificial Sequence
  Description of Artificial Sequence: Synthetic oligonucleotide
aaaaaaaauaccuagaacggcca

SEQ ID NO: 3957 - RNA, 23 nt, Artificial Sequence
  Description of Artificial Sequence: Synthetic oligonucleotide
acaaaaaaauaccuagaacggcc

SEQ ID NO: 3958 - RNA, 23 nt, Artificial Sequence
  Description of Artificial Sequence: Synthetic oligonucleotide
aucaaaaaaauaccuagaacggc

SEQ ID NO: 3959 - RNA, 23 nt, Artificial Sequence
  Description of Artificial Sequence: Synthetic oligonucleotide
auucaaaaaaauaccuagaacgg

SEQ ID NO: 3960 - RNA, 23 nt, Artificial Sequence
  Description of Artificial Sequence: Synthetic oligonucleotide
acuucaaaaaaauaccuagaacg

SEQ ID NO: 3961 - RNA, 23 nt, Artificial Sequence
  Description of Artificial Sequence: Synthetic oligonucleotide
accuucaaaaaaauaccuagaac

SEQ ID NO: 3962 - RNA, 23 nt, Artificial Sequence
  Description of Artificial Sequence: Synthetic oligonucleotide
aaaccuucaaaaaaauaccuaga

SEQ ID NO: 3963 - RNA, 23 nt, Artificial Sequence
  Description of Artificial Sequence: Synthetic oligonucleotide
acaaccuucaaaaaaauaccuag

SEQ ID NO: 3964 - RNA, 23 nt, Artificial Sequence
  Description of Artificial Sequence: Synthetic oligonucleotide
accaaccuucaaaaaaauaccua

SEQ ID NO: 3965 - RNA, 23 nt, Artificial Sequence
  Description of Artificial Sequence: Synthetic oligonucleotide
agccaaccuucaaaaaaauaccu

SEQ ID NO: 3966 - RNA, 23 nt, Artificial Sequence
  Description of Artificial Sequence: Synthetic oligonucleotide
acugccaaccuucaaaaaaauac

SEQ ID NO: 3967 - RNA, 23 nt, Artificial Sequence
  Description of Artificial Sequence: Synthetic oligonucleotide
aaacaacuuucugaaggcccggu

SEQ ID NO: 3968 - RNA, 23 nt, Artificial Sequence
  Description of Artificial Sequence: Synthetic oligonucleotide
acaacaacuuucugaaggcccgg

SEQ ID NO: 3969 - RNA, 23 nt, Artificial Sequence
  Description of Artificial Sequence: Synthetic oligonucleotide
aucaacaacuuucugaaggcccg

SEQ ID NO: 3970 - RNA, 23 nt, Artificial Sequence
  Description of Artificial Sequence: Synthetic oligonucleotide
acaucaacaacuuucugaaggcc

SEQ ID NO: 3971 - RNA, 23 nt, Artificial Sequence
  Description of Artificial Sequence: Synthetic oligonucleotide
aacaucaacaacuuucugaaggc

SEQ ID NO: 3972 - RNA, 23 nt, Artificial Sequence
  Description of Artificial Sequence: Synthetic oligonucleotide
agcacaucaacaacuuucugaag

SEQ ID NO: 3973 - RNA, 23 nt, Artificial Sequence
  Description of Artificial Sequence: Synthetic oligonucleotide
accagcacaucaacaacuuucug

SEQ ID NO: 3974 - RNA, 23 nt, Artificial Sequence
  Description of Artificial Sequence: Synthetic oligonucleotide
agcccuuuguuuuaauggaaucc

SEQ ID NO: 3975 - RNA, 23 nt, Artificial Sequence
  Description of Artificial Sequence: Synthetic oligonucleotide
acagcacucuugcccuuuguuuu

SEQ ID NO: 3976 - RNA, 23 nt, Artificial Sequence
  Description of Artificial Sequence: Synthetic oligonucleotide
aaaguuagugaagucagcacucu

SEQ ID NO: 3977 - RNA, 23 nt, Artificial Sequence
  Description of Artificial Sequence: Synthetic oligonucleotide
acgaaguuagugaagucagcacu

SEQ ID NO: 3978 - RNA, 23 nt, Artificial Sequence
  Description of Artificial Sequence: Synthetic oligonucleotide
aaucgaaguuagugaagucagca

SEQ ID NO: 3979 - RNA, 23 nt, Artificial Sequence
  Description of Artificial Sequence: Synthetic oligonucleotide
agaucgaaguuagugaagucagc

SEQ ID NO: 3980 - RNA, 23 nt, Artificial Sequence
  Description of Artificial Sequence: Synthetic oligonucleotide
aggaucgaaguuagugaagucag

SEQ ID NO: 3981 - RNA, 23 nt, Artificial Sequence
  Description of Artificial Sequence: Synthetic oligonucleotide
acacgaggaucgaaguuagugaa

SEQ ID NO: 3982 - RNA, 23 nt, Artificial Sequence
  Description of Artificial Sequence: Synthetic oligonucleotide
accacgaggaucgaaguuaguga

SEQ ID NO: 3983 - RNA, 23 nt, Artificial Sequence
  Description of Artificial Sequence: Synthetic oligonucleotide
accaaggauucaggaaggaggcc

SEQ ID NO: 3984 - RNA, 23 nt, Artificial Sequence
  Description of Artificial Sequence: Synthetic oligonucleotide
aauccaaggauucaggaaggagg

SEQ ID NO: 3985 - RNA, 23 nt, Artificial Sequence
  Description of Artificial Sequence: Synthetic oligonucleotide
aaauccaaggauucaggaaggag

SEQ ID NO: 3986 - RNA, 23 nt, Artificial Sequence
  Description of Artificial Sequence: Synthetic oligonucleotide
acacacauuccagaagaggaggg

SEQ ID NO: 3987 - RNA, 23 nt, Artificial Sequence
  Description of Artificial Sequence: Synthetic oligonucleotide
aacaauccaggucacacauucca

SEQ ID NO: 3988 - RNA, 23 nt, Artificial Sequence
  Description of Artificial Sequence: Synthetic oligonucleotide
aagcacaauccaggucacacauu

SEQ ID NO: 3989 - RNA, 23 nt, Artificial Sequence
  Description of Artificial Sequence: Synthetic oligonucleotide
acugauggguuccuugagcacaa

SEQ ID NO: 3990 - RNA, 23 nt, Artificial Sequence
  Description of Artificial Sequence: Synthetic oligonucleotide
agacgcugauggguuccuugagc

SEQ ID NO: 3991 - RNA, 23 nt, Artificial Sequence
  Description of Artificial Sequence: Synthetic oligonucleotide
acugacgcugauggguuccuuga

SEQ ID NO: 3992 - RNA, 23 nt, Artificial Sequence
  Description of Artificial Sequence: Synthetic oligonucleotide
acucgcugcugacgcugaugggu

SEQ ID NO: 3993 - RNA, 23 nt, Artificial Sequence
  Description of Artificial Sequence: Synthetic oligonucleotide
aaguuaaguuuacggaauuucaa

SEQ ID NO: 3994 - RNA, 23 nt, Artificial Sequence
  Description of Artificial Sequence: Synthetic oligonucleotide
aaaguuaaguuuacggaauuuca

SEQ ID NO: 3995 - RNA, 23 nt, Artificial Sequence
  Description of Artificial Sequence: Synthetic oligonucleotide
acauugaaguuaaguuuacggaa

SEQ ID NO: 3996 - RNA, 23 nt, Artificial Sequence
  Description of Artificial Sequence: Synthetic oligonucleotide
accauugaaguuaaguuuacgga

SEQ ID NO: 3997 - RNA, 23 nt, Artificial Sequence
  Description of Artificial Sequence: Synthetic oligonucleotide
accaguuguccaccaucaguucu

SEQ ID NO: 3998 - RNA, 23 nt, Artificial Sequence
  Description of Artificial Sequence: Synthetic oligonucleotide
accuguucuucaguggcugagcu

SEQ ID NO: 3999 - RNA, 23 nt, Artificial Sequence
  Description of Artificial Sequence: Synthetic oligonucleotide
aagcuuugauuugccuguucuuc

SEQ ID NO: 4000 - RNA, 23 nt, Artificial Sequence
  Description of Artificial Sequence: Synthetic oligonucleotide
aaaggaagcuuugauuugccugu

SEQ ID NO: 4001 - RNA, 23 nt, Artificial Sequence
  Description of Artificial Sequence: Synthetic oligonucleotide
acuuauuugaaggaagcuuugau

SEQ ID NO: 4002 - RNA, 23 nt, Artificial Sequence
  Description of Artificial Sequence: Synthetic oligonucleotide
aucuuauuugaaggaagcuuuga

SEQ ID NO: 4003 - RNA, 23 nt, Artificial Sequence
  Description of Artificial Sequence: Synthetic oligonucleotide
aaucuuauuugaaggaagcuuug

SEQ ID NO: 4004 - RNA, 23 nt, Artificial Sequence
  Description of Artificial Sequence: Synthetic oligonucleotide
acaucuuauuugaaggaagcuuu

SEQ ID NO: 4005 - RNA, 23 nt, Artificial Sequence
  Description of Artificial Sequence: Synthetic oligonucleotide
accaucuuauuugaaggaagcuu

SEQ ID NO: 4006 - RNA, 23 nt, Artificial Sequence
  Description of Artificial Sequence: Synthetic oligonucleotide
auucauuauuuggauacagacua

SEQ ID NO: 4007 - RNA, 23 nt, Artificial Sequence
  Description of Artificial Sequence: Synthetic oligonucleotide
aaagauucauuauuuggauacag

SEQ ID NO: 4008 - RNA, 23 nt, Artificial Sequence
  Description of Artificial Sequence: Synthetic oligonucleotide
acgaagauucauuauuuggauac

SEQ ID NO: 4009 - RNA, 23 nt, Artificial Sequence
  Description of Artificial Sequence: Synthetic oligonucleotide
accgaagauucauuauuuggaua

SEQ ID NO: 4010 - RNA, 23 nt, Artificial Sequence
  Description of Artificial Sequence: Synthetic oligonucleotide
acccgaagauucauuauuuggau

SEQ ID NO: 4011 - RNA, 23 nt, Artificial Sequence
  Description of Artificial Sequence: Synthetic oligonucleotide
aacccgaagauucauuauuugga

SEQ ID NO: 4012 - RNA, 23 nt, Artificial Sequence
  Description of Artificial Sequence: Synthetic oligonucleotide
acacccgaagauucauuauuugg

SEQ ID NO: 4013 - RNA, 23 nt, Artificial Sequence
  Description of Artificial Sequence: Synthetic oligonucleotide
aacacccgaagauucauuauuug

SEQ ID NO: 4014 - RNA, 23 nt, Artificial Sequence
  Description of Artificial Sequence: Synthetic oligonucleotide
aaacacccgaagauucauuauuu

SEQ ID NO: 4015 - RNA, 23 nt, Artificial Sequence
  Description of Artificial Sequence: Synthetic oligonucleotide
aaaacacccgaagauucauuauu

SEQ ID NO: 4016 - RNA, 23 nt, Artificial Sequence
  Description of Artificial Sequence: Synthetic oligonucleotide
agggaaacacccgaagauucauu

SEQ ID NO: 4017 - RNA, 23 nt, Artificial Sequence
  Description of Artificial Sequence: Synthetic oligonucleotide
aagggaaacacccgaagauucau

SEQ ID NO: 4018 - RNA, 23 nt, Artificial Sequence
  Description of Artificial Sequence: Synthetic oligonucleotide
aaccaagguagaucugugcuuag

SEQ ID NO: 4019 - RNA, 23 nt, Artificial Sequence
  Description of Artificial Sequence: Synthetic oligonucleotide
acaccaagguagaucugugcuua

SEQ ID NO: 4020 - RNA, 23 nt, Artificial Sequence
  Description of Artificial Sequence: Synthetic oligonucleotide
aucaccaagguagaucugugcuu

SEQ ID NO: 4021 - RNA, 23 nt, Artificial Sequence
  Description of Artificial Sequence: Synthetic oligonucleotide
acaaaucaccaagguagaucugu

SEQ ID NO: 4022 - RNA, 23 nt, Artificial Sequence
  Description of Artificial Sequence: Synthetic oligonucleotide
acaaccagccacagcaguugugu

SEQ ID NO: 4023 - RNA, 23 nt, Artificial Sequence
  Description of Artificial Sequence: Synthetic oligonucleotide
accaaccagccacagcaguugug

SEQ ID NO: 4024 - RNA, 23 nt, Artificial Sequence
  Description of Artificial Sequence: Synthetic oligonucleotide
agcaccaaccagccacagcaguu

SEQ ID NO: 4025 - RNA, 23 nt, Artificial Sequence
  Description of Artificial Sequence: Synthetic oligonucleotide
aacaaagcaccaaccagccacag

SEQ ID NO: 4026 - RNA, 23 nt, Artificial Sequence
  Description of Artificial Sequence: Synthetic oligonucleotide
aaaacaaagcaccaaccagccac

SEQ ID NO: 4027 - RNA, 23 nt, Artificial Sequence
  Description of Artificial Sequence: Synthetic oligonucleotide
auaaacaaagcaccaaccagcca

SEQ ID NO: 4028 - RNA, 23 nt, Artificial Sequence
  Description of Artificial Sequence: Synthetic oligonucleotide
aauaaacaaagcaccaaccagcc

SEQ ID NO: 4029 - RNA, 23 nt, Artificial Sequence
  Description of Artificial Sequence: Synthetic oligonucleotide
acauaaacaaagcaccaaccagc

SEQ ID NO: 4030 - RNA, 23 nt, Artificial Sequence
  Description of Artificial Sequence: Synthetic oligonucleotide
accauaaacaaagcaccaaccag

SEQ ID NO: 4031 - RNA, 23 nt, Artificial Sequence
  Description of Artificial Sequence: Synthetic oligonucleotide
aaccauaaacaaagcaccaacca

SEQ ID NO: 4032 - RNA, 23 nt, Artificial Sequence
  Description of Artificial Sequence: Synthetic oligonucleotide
auaccauaaacaaagcaccaacc

SEQ ID NO: 4033 - RNA, 23 nt, Artificial Sequence
  Description of Artificial Sequence: Synthetic oligonucleotide
acuaccauaaacaaagcaccaac

SEQ ID NO: 4034 - RNA, 23 nt, Artificial Sequence
  Description of Artificial Sequence: Synthetic oligonucleotide
acuacuaccauaaacaaagcacc

SEQ ID NO: 4035 - RNA, 23 nt, Artificial Sequence
  Description of Artificial Sequence: Synthetic oligonucleotide
aaaacuacuaccauaaacaaagc

SEQ ID NO: 4036 - RNA, 23 nt, Artificial Sequence
  Description of Artificial Sequence: Synthetic oligonucleotide
aaaaacuacuaccauaaacaaag

SEQ ID NO: 4037 - RNA, 23 nt, Artificial Sequence
  Description of Artificial Sequence: Synthetic oligonucleotide
agaaaaacuacuaccauaaacaa

SEQ ID NO: 4038 - RNA, 23 nt, Artificial Sequence
  Description of Artificial Sequence: Synthetic oligonucleotide
aagaaaaacuacuaccauaaaca

SEQ ID NO: 4039 - RNA, 23 nt, Artificial Sequence
  Description of Artificial Sequence: Synthetic oligonucleotide
acagaaaaacuacuaccauaaac

SEQ ID NO: 4040 - RNA, 23 nt, Artificial Sequence
  Description of Artificial Sequence: Synthetic oligonucleotide
aacagaaaaacuacuaccauaaa

SEQ ID NO: 4041 - RNA, 23 nt, Artificial Sequence
  Description of Artificial Sequence: Synthetic oligonucleotide
auacagaaaaacuacuaccauaa

SEQ ID NO: 4042 - RNA, 23 nt, Artificial Sequence
  Description of Artificial Sequence: Synthetic oligonucleotide
aguguuacagaaaaacuacuacc

SEQ ID NO: 4043 - RNA, 23 nt, Artificial Sequence
  Description of Artificial Sequence: Synthetic oligonucleotide
aaagucaagguacuuuauucuua

SEQ ID NO: 4044 - RNA, 23 nt, Artificial Sequence
  Description of Artificial Sequence: Synthetic oligonucleotide
acaaagucaagguacuuuauucu

SEQ ID NO: 4045 - RNA, 23 nt, Artificial Sequence
  Description of Artificial Sequence: Synthetic oligonucleotide
aacaaagucaagguacuuuauuc

SEQ ID NO: 4046 - RNA, 23 nt, Artificial Sequence
  Description of Artificial Sequence: Synthetic oligonucleotide
aaacaaagucaagguacuuuauu

SEQ ID NO: 4047 - RNA, 23 nt, Artificial Sequence
  Description of Artificial Sequence: Synthetic oligonucleotide
agaacaaagucaagguacuuuau

SEQ ID NO: 4048 - RNA, 23 nt, Artificial Sequence
  Description of Artificial Sequence: Synthetic oligonucleotide
augaacaaagucaagguacuuua

SEQ ID NO: 4049 - RNA, 23 nt, Artificial Sequence
  Description of Artificial Sequence: Synthetic oligonucleotide
acugugaacaaagucaagguacu

SEQ ID NO: 4050 - RNA, 23 nt, Artificial Sequence
  Description of Artificial Sequence: Synthetic oligonucleotide
acuacaugcugugaacaaaguca

SEQ ID NO: 4051 - RNA, 23 nt, Artificial Sequence
  Description of Artificial Sequence: Synthetic oligonucleotide
accuacaugcugugaacaaaguc

SEQ ID NO: 4052 - RNA, 23 nt, Artificial Sequence
  Description of Artificial Sequence: Synthetic oligonucleotide
acccuacaugcugugaacaaagu

SEQ ID NO: 4053 - RNA, 23 nt, Artificial Sequence
  Description of Artificial Sequence: Synthetic oligonucleotide
aacccuacaugcugugaacaaag

SEQ ID NO: 4054 - RNA, 23 nt, Artificial Sequence
  Description of Artificial Sequence: Synthetic oligonucleotide
acacccuacaugcugugaacaaa

SEQ ID NO: 4055 - RNA, 23 nt, Artificial Sequence
  Description of Artificial Sequence: Synthetic oligonucleotide
acaucacccuacaugcugugaac

SEQ ID NO: 4056 - DNA, 23 bp, Artificial Sequence
  Description of Artificial Sequence: Synthetic oligonucleotide
  Description of Combined DNA/RNA Molecule: Synthetic oligonucleotide
agccagtgcucagguccguugug

SEQ ID NO: 4057 - DNA, 23 bp, Artificial Sequence
  Description of Artificial Sequence: Synthetic oligonucleotide
  Description of Combined DNA/RNA Molecule: Synthetic oligonucleotide
aaugccagugcucagguccguug

SEQ ID NO: 4058 - DNA, 23 bp, Artificial Sequence
  Description of Artificial Sequence: Synthetic oligonucleotide
  Description of Combined DNA/RNA Molecule: Synthetic oligonucleotide
aucctuaugccagugcucagguc

SEQ ID NO: 4059 - DNA, 23 bp, Artificial Sequence
  Description of Artificial Sequence: Synthetic oligonucleotide
  Description of Combined DNA/RNA Molecule: Synthetic oligonucleotide
aguccutaugccagugcucaggu

SEQ ID NO: 4060 - DNA, 23 bp, Artificial Sequence
  Description of Artificial Sequence: Synthetic oligonucleotide
  Description of Combined DNA/RNA Molecule: Synthetic oligonucleotide
aagucctuaugccagugcucagg

SEQ ID NO: 4061 - DNA, 23 bp, Artificial Sequence
  Description of Artificial Sequence: Synthetic oligonucleotide
  Description of Combined DNA/RNA Molecule: Synthetic oligonucleotide
aggaagtccuuaugccagugcuc

SEQ ID NO: 4062 - RNA, 23 nt, Artificial Sequence
  Description of Artificial Sequence: Synthetic oligonucleotide
auuaaaagcagcauuuuagucaa

SEQ ID NO: 4063 - RNA, 23 nt, Artificial Sequence
  Description of Artificial Sequence: Synthetic oligonucleotide
auuuaaaagcagcauuuuaguca

SEQ ID NO: 4064 - RNA, 23 nt, Artificial Sequence
  Description of Artificial Sequence: Synthetic oligonucleotide
auuuuaaaagcagcauuuuaguc

SEQ ID NO: 4065 - RNA, 23 nt, Artificial Sequence
  Description of Artificial Sequence: Synthetic oligonucleotide
aguuuuaaaagcagcauuuuagu

SEQ ID NO: 4066 - RNA, 23 nt, Artificial Sequence
  Description of Artificial Sequence: Synthetic oligonucleotide
accuauguuuuaaaagcagcauu

SEQ ID NO: 4067 - RNA, 23 nt, Artificial Sequence
  Description of Artificial Sequence: Synthetic oligonucleotide
auccuauguuuuaaaagcagcau

SEQ ID NO: 4068 - RNA, 23 nt, Artificial Sequence
  Description of Artificial Sequence: Synthetic oligonucleotide
acuacuuuccuauguuuuaaaag

SEQ ID NO: 4069 - DNA, 23 bp, Artificial Sequence
  Description of Artificial Sequence: Synthetic oligonucleotide
  Description of Combined DNA/RNA Molecule: Synthetic oligonucleotide
aaugagtgucgaugucaacaggg

SEQ ID NO: 4070 - DNA, 23 bp, Artificial Sequence
  Description of Artificial Sequence: Synthetic oligonucleotide
  Description of Combined DNA/RNA Molecule: Synthetic oligonucleotide
aguatgagugucgaugucaacag

SEQ ID NO: 4071 - DNA, 23 bp, Artificial Sequence
  Description of Artificial Sequence: Synthetic oligonucleotide
  Description of Combined DNA/RNA Molecule: Synthetic oligonucleotide
agcuguaugagugucgaugucaa

SEQ ID NO: 4072 - DNA, 23 bp, Artificial Sequence
  Description of Artificial Sequence: Synthetic oligonucleotide
  Description of Combined DNA/RNA Molecule: Synthetic oligonucleotide
aggctgtaugagugucgauguca

SEQ ID NO: 4073 - DNA, 23 bp, Artificial Sequence
  Description of Artificial Sequence: Synthetic oligonucleotide
  Description of Combined DNA/RNA Molecule: Synthetic oligonucleotide
auuggctguaugagugucgaugu

SEQ ID NO: 4074 - DNA, 23 bp, Artificial Sequence
  Description of Artificial Sequence: Synthetic oligonucleotide
  Description of Combined DNA/RNA Molecule: Synthetic oligonucleotide
aauacutggcuguaugagugucg

SEQ ID NO: 4075 - DNA, 23 bp, Artificial Sequence
  Description of Artificial Sequence: Synthetic oligonucleotide
  Description of Combined DNA/RNA Molecule: Synthetic oligonucleotide
agucauacuuggcuguaugagug

SEQ ID NO: 4076 - DNA, 23 bp, Artificial Sequence
  Description of Artificial Sequence: Synthetic oligonucleotide
  Description of Combined DNA/RNA Molecule: Synthetic oligonucleotide
aggucatacuuggcuguaugagu

SEQ ID NO: 4077 - DNA, 23 bp, Artificial Sequence
  Description of Artificial Sequence: Synthetic oligonucleotide
  Description of Combined DNA/RNA Molecule: Synthetic oligonucleotide
agggtcauacuuggcuguaugag

SEQ ID NO: 4078 - DNA, 23 bp, Artificial Sequence
  Description of Artificial Sequence: Synthetic oligonucleotide
  Description of Combined DNA/RNA Molecule: Synthetic oligonucleotide
aaagggtcauacuuggcuguaug

SEQ ID NO: 4079 - DNA, 23 bp, Artificial Sequence
  Description of Artificial Sequence: Synthetic oligonucleotide
  Description of Combined DNA/RNA Molecule: Synthetic oligonucleotide
aagggaagggucauacuuggcug

SEQ ID NO: 4080 - RNA, 23 nt, Artificial Sequence
  Description of Artificial Sequence: Synthetic oligonucleotide
acuuaacuagcucaauuuaucuu

SEQ ID NO: 4081 - RNA, 23 nt, Artificial Sequence
  Description of Artificial Sequence: Synthetic oligonucleotide
accuuaacuagcucaauuuaucu

SEQ ID NO: 4082 - RNA, 23 nt, Artificial Sequence
  Description of Artificial Sequence: Synthetic oligonucleotide
agccuuaacuagcucaauuuauc

SEQ ID NO: 4083 - DNA, 23 bp, Artificial Sequence
  Description of Artificial Sequence: Synthetic oligonucleotide
  Description of Combined DNA/RNA Molecule: Synthetic oligonucleotide
agcutcagggaagggucauacuu

SEQ ID NO: 4084 - DNA, 23 bp, Artificial Sequence
  Description of Artificial Sequence: Synthetic oligonucleotide
  Description of Combined DNA/RNA Molecule: Synthetic oligonucleotide
augatcauaggaaacagacaggg

SEQ ID NO: 4085 - DNA, 23 bp, Artificial Sequence
  Description of Artificial Sequence: Synthetic oligonucleotide
  Description of Combined DNA/RNA Molecule: Synthetic oligonucleotide
acuugatcauaggaaacagacag

SEQ ID NO: 4086 - DNA, 23 bp, Artificial Sequence
  Description of Artificial Sequence: Synthetic oligonucleotide
  Description of Combined DNA/RNA Molecule: Synthetic oligonucleotide
agcutgaucauaggaaacagaca

SEQ ID NO: 4087 - DNA, 23 bp, Artificial Sequence
  Description of Artificial Sequence: Synthetic oligonucleotide
  Description of Combined DNA/RNA Molecule: Synthetic oligonucleotide
auugcutgaucauaggaaacaga

SEQ ID NO: 4088 - DNA, 23 bp, Artificial Sequence
  Description of Artificial Sequence: Synthetic oligonucleotide
  Description of Combined DNA/RNA Molecule: Synthetic oligonucleotide
aguugctugaucauaggaaacag

SEQ ID NO: 4089 - DNA, 23 bp, Artificial Sequence
  Description of Artificial Sequence: Synthetic oligonucleotide
  Description of Combined DNA/RNA Molecule: Synthetic oligonucleotide
agaagutgcuugaucauaggaaa

SEQ ID NO: 4090 - RNA, 23 nt, Artificial Sequence
  Description of Artificial Sequence: Synthetic oligonucleotide
acugauuugccuuaacuagcuca

SEQ ID NO: 4091 - RNA, 23 nt, Artificial Sequence
  Description of Artificial Sequence: Synthetic oligonucleotide
accugauuugccuuaacuagcuc

SEQ ID NO: 4092 - RNA, 23 nt, Artificial Sequence
  Description of Artificial Sequence: Synthetic oligonucleotide
aauuuuaccugauuugccuuaac

SEQ ID NO: 4093 - RNA, 23 nt, Artificial Sequence
  Description of Artificial Sequence: Synthetic oligonucleotide
acuauuuuaccugauuugccuua

SEQ ID NO: 4094 - RNA, 23 nt, Artificial Sequence
  Description of Artificial Sequence: Synthetic oligonucleotide
aacuauuuuaccugauuugccuu

SEQ ID NO: 4095 - RNA, 23 nt, Artificial Sequence
  Description of Artificial Sequence: Synthetic oligonucleotide
agacuauuuuaccugauuugccu

SEQ ID NO: 4096 - RNA, 23 nt, Artificial Sequence
  Description of Artificial Sequence: Synthetic oligonucleotide
auagaaucaugacuauuuuaccu

SEQ ID NO: 4097 - RNA, 23 nt, Artificial Sequence
  Description of Artificial Sequence: Synthetic oligonucleotide
aauagaaucaugacuauuuuacc

SEQ ID NO: 4098 - RNA, 23 nt, Artificial Sequence
  Description of Artificial Sequence: Synthetic oligonucleotide
acauagaaucaugacuauuuuac

SEQ ID NO: 4099 - RNA, 23 nt, Artificial Sequence
  Description of Artificial Sequence: Synthetic oligonucleotide
acauuacauagaaucaugacuau

SEQ ID NO: 4100 - RNA, 23 nt, Artificial Sequence
  Description of Artificial Sequence: Synthetic oligonucleotide
aacauuacauagaaucaugacua

SEQ ID NO: 4101 - RNA, 23 nt, Artificial Sequence
  Description of Artificial Sequence: Synthetic oligonucleotide
auacauuacauagaaucaugacu

SEQ ID NO: 4102 - DNA, 23 bp, Artificial Sequence
  Description of Artificial Sequence: Synthetic oligonucleotide
  Description of Combined DNA/RNA Molecule: Synthetic oligonucleotide
aauugutgaggauccucagggaa

SEQ ID NO: 4103 - DNA, 23 bp, Artificial Sequence
  Description of Artificial Sequence: Synthetic oligonucleotide
  Description of Combined DNA/RNA Molecule: Synthetic oligonucleotide
acautgtugaggauccucaggga

SEQ ID NO: 4104 - DNA, 23 bp, Artificial Sequence
  Description of Artificial Sequence: Synthetic oligonucleotide
  Description of Combined DNA/RNA Molecule: Synthetic oligonucleotide
agaccatuguugaggauccucag

SEQ ID NO: 4105 - DNA, 23 bp, Artificial Sequence
  Description of Artificial Sequence: Synthetic oligonucleotide
  Description of Combined DNA/RNA Molecule: Synthetic oligonucleotide
augaccauuguugaggauccuca

SEQ ID NO: 4106 - DNA, 23 bp, Artificial Sequence
  Description of Artificial Sequence: Synthetic oligonucleotide
  Description of Combined DNA/RNA Molecule: Synthetic oligonucleotide
acaaactccacguugaaagcaug

SEQ ID NO: 4107 - DNA, 23 bp, Artificial Sequence
  Description of Artificial Sequence: Synthetic oligonucleotide
  Description of Combined DNA/RNA Molecule: Synthetic oligonucleotide
aucatcaaacuccacguugaaag

SEQ ID NO: 4108 - DNA, 23 bp, Artificial Sequence
  Description of Artificial Sequence: Synthetic oligonucleotide
  Description of Combined DNA/RNA Molecule: Synthetic oligonucleotide
aagucatcaaacuccacguugaa

SEQ ID NO: 4109 - DNA, 23 bp, Artificial Sequence
  Description of Artificial Sequence: Synthetic oligonucleotide
  Description of Combined DNA/RNA Molecule: Synthetic oligonucleotide
agagtcaucaaacuccacguuga

SEQ ID NO: 4110 - DNA, 23 bp, Artificial Sequence
  Description of Artificial Sequence: Synthetic oligonucleotide
  Description of Combined DNA/RNA Molecule: Synthetic oligonucleotide
agagagtcaucaaacuccacguu

SEQ ID NO: 4111 - DNA, 23 bp, Artificial Sequence
  Description of Artificial Sequence: Synthetic oligonucleotide
  Description of Combined DNA/RNA Molecule: Synthetic oligonucleotide
acugagagucaucaaacuccacg

SEQ ID NO: 4112 - DNA, 23 bp, Artificial Sequence
  Description of Artificial Sequence: Synthetic oligonucleotide
  Description of Combined DNA/RNA Molecule: Synthetic oligonucleotide
aucctgagagucaucaaacucca

SEQ ID NO: 4113 - DNA, 23 bp, Artificial Sequence
  Description of Artificial Sequence: Synthetic oligonucleotide
  Description of Combined DNA/RNA Molecule: Synthetic oligonucleotide
augucctgagagucaucaaacuc

SEQ ID NO: 4114 - DNA, 23 bp, Artificial Sequence
  Description of Artificial Sequence: Synthetic oligonucleotide
  Description of Combined DNA/RNA Molecule: Synthetic oligonucleotide
acuutgtccugagagucaucaaa

SEQ ID NO: 4115 - RNA, 23 nt, Artificial Sequence
  Description of Artificial Sequence: Synthetic oligonucleotide
acuguaucacaacucuaauuaua

SEQ ID NO: 4116 - RNA, 23 nt, Artificial Sequence
  Description of Artificial Sequence: Synthetic oligonucleotide
aaauauacucuguaucacaacuc

SEQ ID NO: 4117 - RNA, 23 nt, Artificial Sequence
  Description of Artificial Sequence: Synthetic oligonucleotide
aaaauauacucuguaucacaacu

SEQ ID NO: 4118 - RNA, 23 nt, Artificial Sequence
  Description of Artificial Sequence: Synthetic oligonucleotide
agaaauauacucuguaucacaac

SEQ ID NO: 4119 - DNA, 23 bp, Artificial Sequence
  Description of Artificial Sequence: Synthetic oligonucleotide
  Description of Combined DNA/RNA Molecule: Synthetic oligonucleotide
augctutguccugagagucauca

SEQ ID NO: 4120 - DNA, 23 bp, Artificial Sequence
  Description of Artificial Sequence: Synthetic oligonucleotide
  Description of Combined DNA/RNA Molecule: Synthetic oligonucleotide
acugcutuguccugagagucauc

SEQ ID NO: 4121 - RNA, 23 nt, Artificial Sequence
  Description of Artificial Sequence: Synthetic oligonucleotide
aaugauauauugucugaauggaa

SEQ ID NO: 4122 - DNA, 23 bp, Artificial Sequence
  Description of Artificial Sequence: Synthetic oligonucleotide
  Description of Combined DNA/RNA Molecule: Synthetic oligonucleotide
auccagtgaaccaagugaaguuc

SEQ ID NO: 4123 - DNA, 23 bp, Artificial Sequence
  Description of Artificial Sequence: Synthetic oligonucleotide
  Description of Combined DNA/RNA Molecule: Synthetic oligonucleotide
aguuccagugaaccaagugaagu

SEQ ID NO: 4124 - DNA, 23 bp, Artificial Sequence
  Description of Artificial Sequence: Synthetic oligonucleotide
  Description of Combined DNA/RNA Molecule: Synthetic oligonucleotide
augcacagcuuucccaaaauccc

SEQ ID NO: 4125 - DNA, 23 bp, Artificial Sequence
  Description of Artificial Sequence: Synthetic oligonucleotide
  Description of Combined DNA/RNA Molecule: Synthetic oligonucleotide
agcugcacagcuuucccaaaauc

SEQ ID NO: 4126 - DNA, 23 bp, Artificial Sequence
  Description of Artificial Sequence: Synthetic oligonucleotide
  Description of Combined DNA/RNA Molecule: Synthetic oligonucleotide
aguugctgcacagcuuucccaaa

SEQ ID NO: 4127 - DNA, 23 bp, Artificial Sequence
  Description of Artificial Sequence: Synthetic oligonucleotide
  Description of Combined DNA/RNA Molecule: Synthetic oligonucleotide
auaccuagaacggccaguccauc

SEQ ID NO: 4128 - DNA, 23 bp, Artificial Sequence
  Description of Artificial Sequence: Synthetic oligonucleotide
  Description of Combined DNA/RNA Molecule: Synthetic oligonucleotide
aauacctagaacggccaguccau

SEQ ID NO: 4129 - DNA, 23 bp, Artificial Sequence
  Description of Artificial Sequence: Synthetic oligonucleotide
  Description of Combined DNA/RNA Molecule: Synthetic oligonucleotide
aaaccutcaaaaaaauaccuaga

SEQ ID NO: 4130 - DNA, 23 bp, Artificial Sequence
  Description of Artificial Sequence: Synthetic oligonucleotide
  Description of Combined DNA/RNA Molecule: Synthetic oligonucleotide
augccaaccuucaaaaaaauacc

SEQ ID NO: 4131 - DNA, 23 bp, Artificial Sequence
  Description of Artificial Sequence: Synthetic oligonucleotide
  Description of Combined DNA/RNA Molecule: Synthetic oligonucleotide
acugccaaccuucaaaaaaauac

SEQ ID NO: 4132 - DNA, 23 bp, Artificial Sequence
  Description of Artificial Sequence: Synthetic oligonucleotide
  Description of Combined DNA/RNA Molecule: Synthetic oligonucleotide
aagcgctgccaaccuucaaaaaa

SEQ ID NO: 4133 - DNA, 23 bp, Artificial Sequence
  Description of Artificial Sequence: Synthetic oligonucleotide
  Description of Combined DNA/RNA Molecule: Synthetic oligonucleotide
aggutuagcgcugccaaccuuca

SEQ ID NO: 4134 - DNA, 23 bp, Artificial Sequence
  Description of Artificial Sequence: Synthetic oligonucleotide
  Description of Combined DNA/RNA Molecule: Synthetic oligonucleotide
aacatcaacaacuuucugaaggc

SEQ ID NO: 4135 - DNA, 23 bp, Artificial Sequence
  Description of Artificial Sequence: Synthetic oligonucleotide
  Description of Combined DNA/RNA Molecule: Synthetic oligonucleotide
agcacatcaacaacuuucugaag

SEQ ID NO: 4136 - DNA, 23 bp, Artificial Sequence
  Description of Artificial Sequence: Synthetic oligonucleotide
  Description of Combined DNA/RNA Molecule: Synthetic oligonucleotide
aagcacaucaacaacuuucugaa

SEQ ID NO: 4137 - DNA, 23 bp, Artificial Sequence
  Description of Artificial Sequence: Synthetic oligonucleotide
  Description of Combined DNA/RNA Molecule: Synthetic oligonucleotide
accagcacaucaacaacuuucug

SEQ ID NO: 4138 - DNA, 23 bp, Artificial Sequence
  Description of Artificial Sequence: Synthetic oligonucleotide
  Description of Combined DNA/RNA Molecule: Synthetic oligonucleotide
agcccutuguuuuaauggaaucc

SEQ ID NO: 4139 - DNA, 23 bp, Artificial Sequence
  Description of Artificial Sequence: Synthetic oligonucleotide
  Description of Combined DNA/RNA Molecule: Synthetic oligonucleotide
augccctuuguuuuaauggaauc

SEQ ID NO: 4140 - DNA, 23 bp, Artificial Sequence
  Description of Artificial Sequence: Synthetic oligonucleotide
  Description of Combined DNA/RNA Molecule: Synthetic oligonucleotide
aacucutgcccuuuguuuuaaug

SEQ ID NO: 4141 - DNA, 23 bp, Artificial Sequence
  Description of Artificial Sequence: Synthetic oligonucleotide
  Description of Combined DNA/RNA Molecule: Synthetic oligonucleotide
acactctugcccuuuguuuuaau

SEQ ID NO: 4142 - DNA, 23 bp, Artificial Sequence
  Description of Artificial Sequence: Synthetic oligonucleotide
  Description of Combined DNA/RNA Molecule: Synthetic oligonucleotide
aagcactcuugcccuuuguuuua

SEQ ID NO: 4143 - DNA, 23 bp, Artificial Sequence
  Description of Artificial Sequence: Synthetic oligonucleotide
  Description of Combined DNA/RNA Molecule: Synthetic oligonucleotide
aucagcacucuugcccuuuguuu

SEQ ID NO: 4144 - DNA, 23 bp, Artificial Sequence
  Description of Artificial Sequence: Synthetic oligonucleotide
  Description of Combined DNA/RNA Molecule: Synthetic oligonucleotide
aaagtcagcacucuugcccuuug

SEQ ID NO: 4145 - DNA, 23 bp, Artificial Sequence
  Description of Artificial Sequence: Synthetic oligonucleotide
  Description of Combined DNA/RNA Molecule: Synthetic oligonucleotide
augaagtcagcacucuugcccuu

SEQ ID NO: 4146 - DNA, 23 bp, Artificial Sequence
  Description of Artificial Sequence: Synthetic oligonucleotide
  Description of Combined DNA/RNA Molecule: Synthetic oligonucleotide
aagugaagucagcacucuugccc

SEQ ID NO: 4147 - DNA, 23 bp, Artificial Sequence
  Description of Artificial Sequence: Synthetic oligonucleotide
  Description of Combined DNA/RNA Molecule: Synthetic oligonucleotide
auagtgaagucagcacucuugcc

SEQ ID NO: 4148 - DNA, 23 bp, Artificial Sequence
  Description of Artificial Sequence: Synthetic oligonucleotide
  Description of Combined DNA/RNA Molecule: Synthetic oligonucleotide
aguuagtgaagucagcacucuug

SEQ ID NO: 4149 - DNA, 23 bp, Artificial Sequence
  Description of Artificial Sequence: Synthetic oligonucleotide
  Description of Combined DNA/RNA Molecule: Synthetic oligonucleotide
agaagutagugaagucagcacuc

SEQ ID NO: 4150 - DNA, 23 bp, Artificial Sequence
  Description of Artificial Sequence: Synthetic oligonucleotide
  Description of Combined DNA/RNA Molecule: Synthetic oligonucleotide
acgaagtuagugaagucagcacu

SEQ ID NO: 4151 - DNA, 23 bp, Artificial Sequence
  Description of Artificial Sequence: Synthetic oligonucleotide
  Description of Combined DNA/RNA Molecule: Synthetic oligonucleotide
agaggatcgaaguuagugaaguc

SEQ ID NO: 4152 - DNA, 23 bp, Artificial Sequence
  Description of Artificial Sequence: Synthetic oligonucleotide
  Description of Combined DNA/RNA Molecule: Synthetic oligonucleotide
acgaggaucgaaguuagugaagu

SEQ ID NO: 4153 - DNA, 23 bp, Artificial Sequence
  Description of Artificial Sequence: Synthetic oligonucleotide
  Description of Combined DNA/RNA Molecule: Synthetic oligonucleotide
acaaggauucaggaaggaggcca

SEQ ID NO: 4154 - DNA, 23 bp, Artificial Sequence
  Description of Artificial Sequence: Synthetic oligonucleotide
  Description of Combined DNA/RNA Molecule: Synthetic oligonucleotide
aauccaaggauucaggaaggagg

SEQ ID NO: 4155 - DNA, 23 bp, Artificial Sequence
  Description of Artificial Sequence: Synthetic oligonucleotide
  Description of Combined DNA/RNA Molecule: Synthetic oligonucleotide
acagtgagccuggguagguccag

SEQ ID NO: 4156 - DNA, 23 bp, Artificial Sequence
  Description of Artificial Sequence: Synthetic oligonucleotide
  Description of Combined DNA/RNA Molecule: Synthetic oligonucleotide
agucagtgagccuggguaggucc

SEQ ID NO: 4157 - DNA, 23 bp, Artificial Sequence
  Description of Artificial Sequence: Synthetic oligonucleotide
  Description of Combined DNA/RNA Molecule: Synthetic oligonucleotide
auggtcagugagccuggguaggu

SEQ ID NO: 4158 - DNA, 23 bp, Artificial Sequence
  Description of Artificial Sequence: Synthetic oligonucleotide
  Description of Combined DNA/RNA Molecule: Synthetic oligonucleotide
agguggtcagugagccuggguag

SEQ ID NO: 4159 - DNA, 23 bp, Artificial Sequence
  Description of Artificial Sequence: Synthetic oligonucleotide
  Description of Combined DNA/RNA Molecule: Synthetic oligonucleotide
acacacauuccagaagaggaggg

SEQ ID NO: 4160 - DNA, 23 bp, Artificial Sequence
  Description of Artificial Sequence: Synthetic oligonucleotide
  Description of Combined DNA/RNA Molecule: Synthetic oligonucleotide
agucacacauuccagaagaggag

SEQ ID NO: 4161 - DNA, 23 bp, Artificial Sequence
  Description of Artificial Sequence: Synthetic oligonucleotide
  Description of Combined DNA/RNA Molecule: Synthetic oligonucleotide
aaggtcacacauuccagaagagg

SEQ ID NO: 4162 - DNA, 23 bp, Artificial Sequence
  Description of Artificial Sequence: Synthetic oligonucleotide
  Description of Combined DNA/RNA Molecule: Synthetic oligonucleotide
accaggtcacacauuccagaaga

SEQ ID NO: 4163 - DNA, 23 bp, Artificial Sequence
  Description of Artificial Sequence: Synthetic oligonucleotide
  Description of Combined DNA/RNA Molecule: Synthetic oligonucleotide
aaauccaggucacacauuccaga

SEQ ID NO: 4164 - DNA, 23 bp, Artificial Sequence
  Description of Artificial Sequence: Synthetic oligonucleotide
  Description of Combined DNA/RNA Molecule: Synthetic oligonucleotide
aagcacaauccaggucacacauu

SEQ ID NO: 4165 - DNA, 23 bp, Artificial Sequence
  Description of Artificial Sequence: Synthetic oligonucleotide
  Description of Combined DNA/RNA Molecule: Synthetic oligonucleotide
augagcacaauccaggucacaca

SEQ ID NO: 4166 - DNA, 23 bp, Artificial Sequence
  Description of Artificial Sequence: Synthetic oligonucleotide
  Description of Combined DNA/RNA Molecule: Synthetic oligonucleotide
accutgagcacaauccaggucac

SEQ ID NO: 4167 - DNA, 23 bp, Artificial Sequence
  Description of Artificial Sequence: Synthetic oligonucleotide
  Description of Combined DNA/RNA Molecule: Synthetic oligonucleotide
auuccutgagcacaauccagguc

SEQ ID NO: 4168 - DNA, 23 bp, Artificial Sequence
  Description of Artificial Sequence: Synthetic oligonucleotide
  Description of Combined DNA/RNA Molecule: Synthetic oligonucleotide
aguucctugagcacaauccaggu

SEQ ID NO: 4169 - DNA, 23 bp, Artificial Sequence
  Description of Artificial Sequence: Synthetic oligonucleotide
  Description of Combined DNA/RNA Molecule: Synthetic oligonucleotide
augggutccuugagcacaaucca

SEQ ID NO: 4170 - DNA, 23 bp, Artificial Sequence
  Description of Artificial Sequence: Synthetic oligonucleotide
  Description of Combined DNA/RNA Molecule: Synthetic oligonucleotide
aaugggtuccuugagcacaaucc

SEQ ID NO: 4171 - DNA, 23 bp, Artificial Sequence
  Description of Artificial Sequence: Synthetic oligonucleotide
  Description of Combined DNA/RNA Molecule: Synthetic oligonucleotide
agcugatggguuccuugagcaca

SEQ ID NO: 4172 - DNA, 23 bp, Artificial Sequence
  Description of Artificial Sequence: Synthetic oligonucleotide
  Description of Combined DNA/RNA Molecule: Synthetic oligonucleotide
acgctgauggguuccuugagcac

SEQ ID NO: 4173 - DNA, 23 bp, Artificial Sequence
  Description of Artificial Sequence: Synthetic oligonucleotide
  Description of Combined DNA/RNA Molecule: Synthetic oligonucleotide
agacgctgauggguuccuugagc

SEQ ID NO: 4174 - DNA, 23 bp, Artificial Sequence
  Description of Artificial Sequence: Synthetic oligonucleotide
  Description of Combined DNA/RNA Molecule: Synthetic oligonucleotide
augctgacgcugauggguuccuu

SEQ ID NO: 4175 - DNA, 23 bp, Artificial Sequence
  Description of Artificial Sequence: Synthetic oligonucleotide
  Description of Combined DNA/RNA Molecule: Synthetic oligonucleotide
agcugctgacgcugauggguucc

SEQ ID NO: 4176 - DNA, 23 bp, Artificial Sequence
  Description of Artificial Sequence: Synthetic oligonucleotide
  Description of Combined DNA/RNA Molecule: Synthetic oligonucleotide
auuaagtuuacggaauuucaaca

SEQ ID NO: 4177 - DNA, 23 bp, Artificial Sequence
  Description of Artificial Sequence: Synthetic oligonucleotide
  Description of Combined DNA/RNA Molecule: Synthetic oligonucleotide
aagutaaguuuacggaauuucaa

SEQ ID NO: 4178 - DNA, 23 bp, Artificial Sequence
  Description of Artificial Sequence: Synthetic oligonucleotide
  Description of Combined DNA/RNA Molecule: Synthetic oligonucleotide
agaagutaaguuuacggaauuuc

SEQ ID NO: 4179 - DNA, 23 bp, Artificial Sequence
  Description of Artificial Sequence: Synthetic oligonucleotide
  Description of Combined DNA/RNA Molecule: Synthetic oligonucleotide
augaagtuaaguuuacggaauuu

SEQ ID NO: 4180 - DNA, 23 bp, Artificial Sequence
  Description of Artificial Sequence: Synthetic oligonucleotide
  Description of Combined DNA/RNA Molecule: Synthetic oligonucleotide
aauugaaguuaaguuuacggaau

SEQ ID NO: 4181 - DNA, 23 bp, Artificial Sequence
  Description of Artificial Sequence: Synthetic oligonucleotide
  Description of Combined DNA/RNA Molecule: Synthetic oligonucleotide
acautgaaguuaaguuuacggaa

SEQ ID NO: 4182 - DNA, 23 bp, Artificial Sequence
  Description of Artificial Sequence: Synthetic oligonucleotide
  Description of Combined DNA/RNA Molecule: Synthetic oligonucleotide
auguccaccaucaguucuucggg

SEQ ID NO: 4183 - DNA, 23 bp, Artificial Sequence
  Description of Artificial Sequence: Synthetic oligonucleotide
  Description of Combined DNA/RNA Molecule: Synthetic oligonucleotide
aagutgtccaccaucaguucuuc

SEQ ID NO: 4184 - DNA, 23 bp, Artificial Sequence
  Description of Artificial Sequence: Synthetic oligonucleotide
  Description of Combined DNA/RNA Molecule: Synthetic oligonucleotide
accagutguccaccaucaguucu

SEQ ID NO: 4185 - DNA, 23 bp, Artificial Sequence
  Description of Artificial Sequence: Synthetic oligonucleotide
  Description of Combined DNA/RNA Molecule: Synthetic oligonucleotide
agccagtuguccaccaucaguuc

SEQ ID NO: 4186 - DNA, 23 bp, Artificial Sequence
  Description of Artificial Sequence: Synthetic oligonucleotide
  Description of Combined DNA/RNA Molecule: Synthetic oligonucleotide
agcgccaguuguccaccaucagu

SEQ ID NO: 4187 - DNA, 23 bp, Artificial Sequence
  Description of Artificial Sequence: Synthetic oligonucleotide
  Description of Combined DNA/RNA Molecule: Synthetic oligonucleotide
aguucutcaguggcugagcuggg

SEQ ID NO: 4188 - DNA, 23 bp, Artificial Sequence
  Description of Artificial Sequence: Synthetic oligonucleotide
  Description of Combined DNA/RNA Molecule: Synthetic oligonucleotide
augutctucaguggcugagcugg

SEQ ID NO: 4189 - DNA, 23 bp, Artificial Sequence
  Description of Artificial Sequence: Synthetic oligonucleotide
  Description of Combined DNA/RNA Molecule: Synthetic oligonucleotide
accugutcuucaguggcugagcu

SEQ ID NO: 4190 - DNA, 23 bp, Artificial Sequence
  Description of Artificial Sequence: Synthetic oligonucleotide
  Description of Combined DNA/RNA Molecule: Synthetic oligonucleotide
agcctgtucuucaguggcugagc

SEQ ID NO: 4191 - DNA, 23 bp, Artificial Sequence
  Description of Artificial Sequence: Synthetic oligonucleotide
  Description of Combined DNA/RNA Molecule: Synthetic oligonucleotide
auugcctguucuucaguggcuga

SEQ ID NO: 4192 - DNA, 23 bp, Artificial Sequence
  Description of Artificial Sequence: Synthetic oligonucleotide
  Description of Combined DNA/RNA Molecule: Synthetic oligonucleotide
augatutgccuguucuucagugg

SEQ ID NO: 4193 - DNA, 23 bp, Artificial Sequence
  Description of Artificial Sequence: Synthetic oligonucleotide
  Description of Combined DNA/RNA Molecule: Synthetic oligonucleotide
auugautugccuguucuucagug

SEQ ID NO: 4194 - DNA, 23 bp, Artificial Sequence
  Description of Artificial Sequence: Synthetic oligonucleotide
  Description of Combined DNA/RNA Molecule: Synthetic oligonucleotide
auuugatuugccuguucuucagu

SEQ ID NO: 4195 - DNA, 23 bp, Artificial Sequence
  Description of Artificial Sequence: Synthetic oligonucleotide
  Description of Combined DNA/RNA Molecule: Synthetic oligonucleotide
acuutgauuugccuguucuucag

SEQ ID NO: 4196 - DNA, 23 bp, Artificial Sequence
  Description of Artificial Sequence: Synthetic oligonucleotide
  Description of Combined DNA/RNA Molecule: Synthetic oligonucleotide
aagctutgauuugccuguucuuc

SEQ ID NO: 4197 - DNA, 23 bp, Artificial Sequence
  Description of Artificial Sequence: Synthetic oligonucleotide
  Description of Combined DNA/RNA Molecule: Synthetic oligonucleotide
aaagcutugauuugccuguucuu

SEQ ID NO: 4198 - DNA, 23 bp, Artificial Sequence
  Description of Artificial Sequence: Synthetic oligonucleotide
  Description of Combined DNA/RNA Molecule: Synthetic oligonucleotide
agaagctuugauuugccuguucu

SEQ ID NO: 4199 - DNA, 23 bp, Artificial Sequence
  Description of Artificial Sequence: Synthetic oligonucleotide
  Description of Combined DNA/RNA Molecule: Synthetic oligonucleotide
aaaggaagcuuugauuugccugu

SEQ ID NO: 4200 - DNA, 23 bp, Artificial Sequence
  Description of Artificial Sequence: Synthetic oligonucleotide
  Description of Combined DNA/RNA Molecule: Synthetic oligonucleotide
agaaggaagcuuugauuugccug

SEQ ID NO: 4201 - DNA, 23 bp, Artificial Sequence
  Description of Artificial Sequence: Synthetic oligonucleotide
  Description of Combined DNA/RNA Molecule: Synthetic oligonucleotide
auuugaaggaagcuuugauuugc

SEQ ID NO: 4202 - DNA, 23 bp, Artificial Sequence
  Description of Artificial Sequence: Synthetic oligonucleotide
  Description of Combined DNA/RNA Molecule: Synthetic oligonucleotide
aauutgaaggaagcuuugauuug

SEQ ID NO: 4203 - DNA, 23 bp, Artificial Sequence
  Description of Artificial Sequence: Synthetic oligonucleotide
  Description of Combined DNA/RNA Molecule: Synthetic oligonucleotide
auuatutgaaggaagcuuugauu

SEQ ID NO: 4204 - DNA, 23 bp, Artificial Sequence
  Description of Artificial Sequence: Synthetic oligonucleotide
  Description of Combined DNA/RNA Molecule: Synthetic oligonucleotide
aucutatuugaaggaagcuuuga

SEQ ID NO: 4205 - DNA, 23 bp, Artificial Sequence
  Description of Artificial Sequence: Synthetic oligonucleotide
  Description of Combined DNA/RNA Molecule: Synthetic oligonucleotide
aauctuauuugaaggaagcuuug

SEQ ID NO: 4206 - DNA, 23 bp, Artificial Sequence
  Description of Artificial Sequence: Synthetic oligonucleotide
  Description of Combined DNA/RNA Molecule: Synthetic oligonucleotide
accatctuauuugaaggaagcuu

SEQ ID NO: 4207 - DNA, 23 bp, Artificial Sequence
  Description of Artificial Sequence: Synthetic oligonucleotide
  Description of Combined DNA/RNA Molecule: Synthetic oligonucleotide
agaccatcuuauuugaaggaagc

SEQ ID NO: 4208 - DNA, 23 bp, Artificial Sequence
  Description of Artificial Sequence: Synthetic oligonucleotide
  Description of Combined DNA/RNA Molecule: Synthetic oligonucleotide
aggaccaucuuauuugaaggaag

SEQ ID NO: 4209 - DNA, 23 bp, Artificial Sequence
  Description of Artificial Sequence: Synthetic oligonucleotide
  Description of Combined DNA/RNA Molecule: Synthetic oligonucleotide
aaugggaccaucuuauuugaagg

SEQ ID NO: 4210 - DNA, 23 bp, Artificial Sequence
  Description of Artificial Sequence: Synthetic oligonucleotide
  Description of Combined DNA/RNA Molecule: Synthetic oligonucleotide
auucautauuuggauacagacua

SEQ ID NO: 4211 - DNA, 23 bp, Artificial Sequence
  Description of Artificial Sequence: Synthetic oligonucleotide
  Description of Combined DNA/RNA Molecule: Synthetic oligonucleotide
aauucatuauuuggauacagacu

SEQ ID NO: 4212 - DNA, 23 bp, Artificial Sequence
  Description of Artificial Sequence: Synthetic oligonucleotide
  Description of Combined DNA/RNA Molecule: Synthetic oligonucleotide
agautcauuauuuggauacagac

SEQ ID NO: 4213 - DNA, 23 bp, Artificial Sequence
  Description of Artificial Sequence: Synthetic oligonucleotide
  Description of Combined DNA/RNA Molecule: Synthetic oligonucleotide
aaagautcauuauuuggauacag

SEQ ID NO: 4214 - DNA, 23 bp, Artificial Sequence
  Description of Artificial Sequence: Synthetic oligonucleotide
  Description of Combined DNA/RNA Molecule: Synthetic oligonucleotide
agaagatucauuauuuggauaca

SEQ ID NO: 4215 - DNA, 23 bp, Artificial Sequence
  Description of Artificial Sequence: Synthetic oligonucleotide
  Description of Combined DNA/RNA Molecule: Synthetic oligonucleotide
acgaagauucauuauuuggauac

SEQ ID NO: 4216 - DNA, 23 bp, Artificial Sequence
  Description of Artificial Sequence: Synthetic oligonucleotide
  Description of Combined DNA/RNA Molecule: Synthetic oligonucleotide
agaaacacccgaagauucauuau

SEQ ID NO: 4217 - DNA, 23 bp, Artificial Sequence
  Description of Artificial Sequence: Synthetic oligonucleotide
  Description of Combined DNA/RNA Molecule: Synthetic oligonucleotide
agggaaacacccgaagauucauu

SEQ ID NO: 4218 - DNA, 23 bp, Artificial Sequence
  Description of Artificial Sequence: Synthetic oligonucleotide
  Description of Combined DNA/RNA Molecule: Synthetic oligonucleotide
aguagatcugugcuuagcuaaag

SEQ ID NO: 4219 - DNA, 23 bp, Artificial Sequence
  Description of Artificial Sequence: Synthetic oligonucleotide
  Description of Combined DNA/RNA Molecule: Synthetic oligonucleotide
agguagaucugugcuuagcuaaa

SEQ ID NO: 4220 - DNA, 23 bp, Artificial Sequence
  Description of Artificial Sequence: Synthetic oligonucleotide
  Description of Combined DNA/RNA Molecule: Synthetic oligonucleotide
aaagguagaucugugcuuagcua

SEQ ID NO: 4221 - DNA, 23 bp, Artificial Sequence
  Description of Artificial Sequence: Synthetic oligonucleotide
  Description of Combined DNA/RNA Molecule: Synthetic oligonucleotide
acaaggtagaucugugcuuagcu

SEQ ID NO: 4222 - DNA, 23 bp, Artificial Sequence
  Description of Artificial Sequence: Synthetic oligonucleotide
  Description of Combined DNA/RNA Molecule: Synthetic oligonucleotide
aaaatcaccaagguagaucugug

SEQ ID NO: 4223 - DNA, 23 bp, Artificial Sequence
  Description of Artificial Sequence: Synthetic oligonucleotide
  Description of Combined DNA/RNA Molecule: Synthetic oligonucleotide
aucuagtcuucacauuuuauuag

SEQ ID NO: 4224 - DNA, 23 bp, Artificial Sequence
  Description of Artificial Sequence: Synthetic oligonucleotide
  Description of Combined DNA/RNA Molecule: Synthetic oligonucleotide
acaaccagccacagcaguugugu

SEQ ID NO: 4225 - RNA, 23 nt, Artificial Sequence
  Description of Artificial Sequence: Synthetic oligonucleotide
aaaagcaccaaccagccacagca

SEQ ID NO: 4226 - DNA, 23 bp, Artificial Sequence
  Description of Artificial Sequence: Synthetic oligonucleotide
  Description of Combined DNA/RNA Molecule: Synthetic oligonucleotide
auaccataaacaaagcaccaacc

SEQ ID NO: 4227 - DNA, 23 bp, Artificial Sequence
  Description of Artificial Sequence: Synthetic oligonucleotide
  Description of Combined DNA/RNA Molecule: Synthetic oligonucleotide
aacuactaccauaaacaaagcac

SEQ ID NO: 4228 - DNA, 23 bp, Artificial Sequence
  Description of Artificial Sequence: Synthetic oligonucleotide
  Description of Combined DNA/RNA Molecule: Synthetic oligonucleotide
aaaacuacuaccauaaacaaagc

SEQ ID NO: 4229 - DNA, 23 bp, Artificial Sequence
  Description of Artificial Sequence: Synthetic oligonucleotide
  Description of Combined DNA/RNA Molecule: Synthetic oligonucleotide
aaaaactacuaccauaaacaaag

SEQ ID NO: 4230 - DNA, 23 bp, Artificial Sequence
  Description of Artificial Sequence: Synthetic oligonucleotide
  Description of Combined DNA/RNA Molecule: Synthetic oligonucleotide
auacagaaaaacuacuaccauaa

SEQ ID NO: 4231 - DNA, 23 bp, Artificial Sequence
  Description of Artificial Sequence: Synthetic oligonucleotide
  Description of Combined DNA/RNA Molecule: Synthetic oligonucleotide
aguuacagaaaaacuacuaccau

SEQ ID NO: 4232 - DNA, 23 bp, Artificial Sequence
  Description of Artificial Sequence: Synthetic oligonucleotide
  Description of Combined DNA/RNA Molecule: Synthetic oligonucleotide
agugtuacagaaaaacuacuacc

SEQ ID NO: 4233 - DNA, 23 bp, Artificial Sequence
  Description of Artificial Sequence: Synthetic oligonucleotide
  Description of Combined DNA/RNA Molecule: Synthetic oligonucleotide
augugutacagaaaaacuacuac

SEQ ID NO: 4234 - DNA, 23 bp, Artificial Sequence
  Description of Artificial Sequence: Synthetic oligonucleotide
  Description of Combined DNA/RNA Molecule: Synthetic oligonucleotide
acugtgtuacagaaaaacuacua

SEQ ID NO: 4235 - DNA, 23 bp, Artificial Sequence
  Description of Artificial Sequence: Synthetic oligonucleotide
  Description of Combined DNA/RNA Molecule: Synthetic oligonucleotide
acaaggtacuuuauucuuauuuc

SEQ ID NO: 4236 - DNA, 23 bp, Artificial Sequence
  Description of Artificial Sequence: Synthetic oligonucleotide
  Description of Combined DNA/RNA Molecule: Synthetic oligonucleotide
aagucaagguacuuuauucuuau

SEQ ID NO: 4237 - DNA, 23 bp, Artificial Sequence
  Description of Artificial Sequence: Synthetic oligonucleotide
  Description of Combined DNA/RNA Molecule: Synthetic oligonucleotide
aaagtcaagguacuuuauucuua

SEQ ID NO: 4238 - DNA, 23 bp, Artificial Sequence
  Description of Artificial Sequence: Synthetic oligonucleotide
  Description of Combined DNA/RNA Molecule: Synthetic oligonucleotide
acaaagtcaagguacuuuauucu

SEQ ID NO: 4239 - DNA, 23 bp, Artificial Sequence
  Description of Artificial Sequence: Synthetic oligonucleotide
  Description of Combined DNA/RNA Molecule: Synthetic oligonucleotide
augaacaaagucaagguacuuua

SEQ ID NO: 4240 - DNA, 23 bp, Artificial Sequence
  Description of Artificial Sequence: Synthetic oligonucleotide
  Description of Combined DNA/RNA Molecule: Synthetic oligonucleotide
augugaacaaagucaagguacuu

SEQ ID NO: 4241 - DNA, 23 bp, Artificial Sequence
  Description of Artificial Sequence: Synthetic oligonucleotide
  Description of Combined DNA/RNA Molecule: Synthetic oligonucleotide
acugtgaacaaagucaagguacu

SEQ ID NO: 4242 - DNA, 23 bp, Artificial Sequence
  Description of Artificial Sequence: Synthetic oligonucleotide
  Description of Combined DNA/RNA Molecule: Synthetic oligonucleotide
augctgtgaacaaagucaaggua

SEQ ID NO: 4243 - DNA, 23 bp, Artificial Sequence
  Description of Artificial Sequence: Synthetic oligonucleotide
  Description of Combined DNA/RNA Molecule: Synthetic oligonucleotide
acaugctgugaacaaagucaagg

SEQ ID NO: 4244 - DNA, 23 bp, Artificial Sequence
  Description of Artificial Sequence: Synthetic oligonucleotide
  Description of Combined DNA/RNA Molecule: Synthetic oligonucleotide
accuacaugcugugaacaaaguc

SEQ ID NO: 4245 - DNA, 23 bp, Artificial Sequence
  Description of Artificial Sequence: Synthetic oligonucleotide
  Description of Combined DNA/RNA Molecule: Synthetic oligonucleotide
aucatcacccuacaugcugugaa

SEQ ID NO: 4246 - DNA, 23 bp, Artificial Sequence
  Description of Artificial Sequence: Synthetic oligonucleotide
  Description of Combined DNA/RNA Molecule: Synthetic oligonucleotide
agcucatcacccuacaugcugug

SEQ ID NO: 4247 - DNA, 23 bp, Artificial Sequence
  Description of Artificial Sequence: Synthetic oligonucleotide
  Description of Combined DNA/RNA Molecule: Synthetic oligonucleotide
augctcaucacccuacaugcugu

SEQ ID NO: 4248 - DNA, 23 bp, Artificial Sequence
  Description of Artificial Sequence: Synthetic oligonucleotide
  Description of Combined DNA/RNA Molecule: Synthetic oligonucleotide
aagugctcaucacccuacaugcu

SEQ ID NO: 4249 - DNA, 23 bp, Artificial Sequence
  Description of Artificial Sequence: Synthetic oligonucleotide
  Description of Combined DNA/RNA Molecule: Synthetic oligonucleotide
auuaaaagcagcauuuuagucaa

SEQ ID NO: 4250 - DNA, 23 bp, Artificial Sequence
  Description of Artificial Sequence: Synthetic oligonucleotide
  Description of Combined DNA/RNA Molecule: Synthetic oligonucleotide
augututaaaagcagcauuuuag

SEQ ID NO: 4251 - DNA, 23 bp, Artificial Sequence
  Description of Artificial Sequence: Synthetic oligonucleotide
  Description of Combined DNA/RNA Molecule: Synthetic oligonucleotide
acuatgtuuuaaaagcagcauuu

SEQ ID NO: 4252 - DNA, 23 bp, Artificial Sequence
  Description of Artificial Sequence: Synthetic oligonucleotide
  Description of Combined DNA/RNA Molecule: Synthetic oligonucleotide
aucctatguuuuaaaagcagcau

SEQ ID NO: 4253 - DNA, 23 bp, Artificial Sequence
  Description of Artificial Sequence: Synthetic oligonucleotide
  Description of Combined DNA/RNA Molecule: Synthetic oligonucleotide
auuccuauguuuuaaaagcagca

SEQ ID NO: 4254 - DNA, 23 bp, Artificial Sequence
  Description of Artificial Sequence: Synthetic oligonucleotide
  Description of Combined DNA/RNA Molecule: Synthetic oligonucleotide
auuucctauguuuuaaaagcagc

SEQ ID NO: 4255 - DNA, 23 bp, Artificial Sequence
  Description of Artificial Sequence: Synthetic oligonucleotide
  Description of Combined DNA/RNA Molecule: Synthetic oligonucleotide
auactutccuauguuuuaaaagc

SEQ ID NO: 4256 - DNA, 23 bp, Artificial Sequence
  Description of Artificial Sequence: Synthetic oligonucleotide
  Description of Combined DNA/RNA Molecule: Synthetic oligonucleotide
acautctacuuuccuauguuuua

SEQ ID NO: 4257 - DNA, 23 bp, Artificial Sequence
  Description of Artificial Sequence: Synthetic oligonucleotide
  Description of Combined DNA/RNA Molecule: Synthetic oligonucleotide
augctatggauuugcacucaacc

SEQ ID NO: 4258 - DNA, 23 bp, Artificial Sequence
  Description of Artificial Sequence: Synthetic oligonucleotide
  Description of Combined DNA/RNA Molecule: Synthetic oligonucleotide
agugcuauggauuugcacucaac

SEQ ID NO: 4259 - DNA, 23 bp, Artificial Sequence
  Description of Artificial Sequence: Synthetic oligonucleotide
  Description of Combined DNA/RNA Molecule: Synthetic oligonucleotide
auaacuagcucaauuuaucuugu

SEQ ID NO: 4260 - DNA, 23 bp, Artificial Sequence
  Description of Artificial Sequence: Synthetic oligonucleotide
  Description of Combined DNA/RNA Molecule: Synthetic oligonucleotide
auuaactagcucaauuuaucuug

SEQ ID NO: 4261 - DNA, 23 bp, Artificial Sequence
  Description of Artificial Sequence: Synthetic oligonucleotide
  Description of Combined DNA/RNA Molecule: Synthetic oligonucleotide
augccutaacuagcucaauuuau

SEQ ID NO: 4262 - DNA, 23 bp, Artificial Sequence
  Description of Artificial Sequence: Synthetic oligonucleotide
  Description of Combined DNA/RNA Molecule: Synthetic oligonucleotide
auugcctuaacuagcucaauuua

SEQ ID NO: 4263 - DNA, 23 bp, Artificial Sequence
  Description of Artificial Sequence: Synthetic oligonucleotide
  Description of Combined DNA/RNA Molecule: Synthetic oligonucleotide
augatutgccuuaacuagcucaa

SEQ ID NO: 4264 - DNA, 23 bp, Artificial Sequence
  Description of Artificial Sequence: Synthetic oligonucleotide
  Description of Combined DNA/RNA Molecule: Synthetic oligonucleotide
aacctgauuugccuuaacuagcu

SEQ ID NO: 4265 - DNA, 23 bp, Artificial Sequence
  Description of Artificial Sequence: Synthetic oligonucleotide
  Description of Combined DNA/RNA Molecule: Synthetic oligonucleotide
auuacctgauuugccuuaacuag

SEQ ID NO: 4266 - DNA, 23 bp, Artificial Sequence
  Description of Artificial Sequence: Synthetic oligonucleotide
  Description of Combined DNA/RNA Molecule: Synthetic oligonucleotide
aauutuaccugauuugccuuaac

SEQ ID NO: 4267 - DNA, 23 bp, Artificial Sequence
  Description of Artificial Sequence: Synthetic oligonucleotide
  Description of Combined DNA/RNA Molecule: Synthetic oligonucleotide
auaututaccugauuugccuuaa

SEQ ID NO: 4268 - DNA, 23 bp, Artificial Sequence
  Description of Artificial Sequence: Synthetic oligonucleotide
  Description of Combined DNA/RNA Molecule: Synthetic oligonucleotide
agactatuuuaccugauuugccu

SEQ ID NO: 4269 - DNA, 23 bp, Artificial Sequence
  Description of Artificial Sequence: Synthetic oligonucleotide
  Description of Combined DNA/RNA Molecule: Synthetic oligonucleotide
augacuauuuuaccugauuugcc

SEQ ID NO: 4270 - DNA, 23 bp, Artificial Sequence
  Description of Artificial Sequence: Synthetic oligonucleotide
  Description of Combined DNA/RNA Molecule: Synthetic oligonucleotide
aaugactauuuuaccugauuugc

SEQ ID NO: 4271 - DNA, 23 bp, Artificial Sequence
  Description of Artificial Sequence: Synthetic oligonucleotide
  Description of Combined DNA/RNA Molecule: Synthetic oligonucleotide
aucatgacuauuuuaccugauuu

SEQ ID NO: 4272 - DNA, 23 bp, Artificial Sequence
  Description of Artificial Sequence: Synthetic oligonucleotide
  Description of Combined DNA/RNA Molecule: Synthetic oligonucleotide
aaaucatgacuauuuuaccugau

SEQ ID NO: 4273 - DNA, 23 bp, Artificial Sequence
  Description of Artificial Sequence: Synthetic oligonucleotide
  Description of Combined DNA/RNA Molecule: Synthetic oligonucleotide
agaatcaugacuauuuuaccuga

SEQ ID NO: 4274 - DNA, 23 bp, Artificial Sequence
  Description of Artificial Sequence: Synthetic oligonucleotide
  Description of Combined DNA/RNA Molecule: Synthetic oligonucleotide
auagaatcaugacuauuuuaccu

SEQ ID NO: 4275 - DNA, 23 bp, Artificial Sequence
  Description of Artificial Sequence: Synthetic oligonucleotide
  Description of Combined DNA/RNA Molecule: Synthetic oligonucleotide
aauagaaucaugacuauuuuacc

SEQ ID NO: 4276 - DNA, 23 bp, Artificial Sequence
  Description of Artificial Sequence: Synthetic oligonucleotide
  Description of Combined DNA/RNA Molecule: Synthetic oligonucleotide
auacautacauagaaucaugacu

SEQ ID NO: 4277 - DNA, 23 bp, Artificial Sequence
  Description of Artificial Sequence: Synthetic oligonucleotide
  Description of Combined DNA/RNA Molecule: Synthetic oligonucleotide
auuacatuacauagaaucaugac

SEQ ID NO: 4278 - DNA, 23 bp, Artificial Sequence
  Description of Artificial Sequence: Synthetic oligonucleotide
  Description of Combined DNA/RNA Molecule: Synthetic oligonucleotide
aggutuacauuacauagaaucau

SEQ ID NO: 4279 - DNA, 23 bp, Artificial Sequence
  Description of Artificial Sequence: Synthetic oligonucleotide
  Description of Combined DNA/RNA Molecule: Synthetic oligonucleotide
acuctgtaauucaaaagucauua

SEQ ID NO: 4280 - DNA, 23 bp, Artificial Sequence
  Description of Artificial Sequence: Synthetic oligonucleotide
  Description of Combined DNA/RNA Molecule: Synthetic oligonucleotide
aauctctguaauucaaaagucau

SEQ ID NO: 4281 - DNA, 23 bp, Artificial Sequence
  Description of Artificial Sequence: Synthetic oligonucleotide
  Description of Combined DNA/RNA Molecule: Synthetic oligonucleotide
aguatcacaacucuaauuauaac

SEQ ID NO: 4282 - DNA, 23 bp, Artificial Sequence
  Description of Artificial Sequence: Synthetic oligonucleotide
  Description of Combined DNA/RNA Molecule: Synthetic oligonucleotide
acugtatcacaacucuaauuaua

SEQ ID NO: 4283 - DNA, 23 bp, Artificial Sequence
  Description of Artificial Sequence: Synthetic oligonucleotide
  Description of Combined DNA/RNA Molecule: Synthetic oligonucleotide
aucuguaucacaacucuaauuau

SEQ ID NO: 4284 - DNA, 23 bp, Artificial Sequence
  Description of Artificial Sequence: Synthetic oligonucleotide
  Description of Combined DNA/RNA Molecule: Synthetic oligonucleotide
acuctgtaucacaacucuaauua

SEQ ID NO: 4285 - DNA, 23 bp, Artificial Sequence
  Description of Artificial Sequence: Synthetic oligonucleotide
  Description of Combined DNA/RNA Molecule: Synthetic oligonucleotide
auactctguaucacaacucuaau

SEQ ID NO: 4286 - DNA, 23 bp, Artificial Sequence
  Description of Artificial Sequence: Synthetic oligonucleotide
  Description of Combined DNA/RNA Molecule: Synthetic oligonucleotide
auauactcuguaucacaacucua

SEQ ID NO: 4287 - DNA, 23 bp, Artificial Sequence
  Description of Artificial Sequence: Synthetic oligonucleotide
  Description of Combined DNA/RNA Molecule: Synthetic oligonucleotide
aaauauacucuguaucacaacuc

SEQ ID NO: 4288 - DNA, 23 bp, Artificial Sequence
  Description of Artificial Sequence: Synthetic oligonucleotide
  Description of Combined DNA/RNA Molecule: Synthetic oligonucleotide
auaugatauauugucugaaugga

SEQ ID NO: 4289 - DNA, 23 bp, Artificial Sequence
  Description of Artificial Sequence: Synthetic oligonucleotide
  Description of Combined DNA/RNA Molecule: Synthetic oligonucleotide
auuatgauauauugucugaaugg

SEQ ID NO: 4290 - RNA, 23 nt, Artificial Sequence
  Description of Artificial Sequence: Synthetic oligonucleotide
auagucaugauucuauguaaugu

SEQ ID NO: 4291 - RNA, 23 nt, Artificial Sequence
  Description of Artificial Sequence: Synthetic oligonucleotide
caagagugcugacuucacuaacu

SEQ ID NO: 4292 - RNA, 21 nt, Artificial Sequence
  Description of Artificial Sequence: Synthetic oligonucleotide
agaucggugccgauuccugcu

SEQ ID NO: 4293 - RNA, 23 nt, Artificial Sequence
  Description of Artificial Sequence: Synthetic oligonucleotide
uccauugaaguuaaguuuacgga
